(19) United States
(12) Patent Application Publication
(10) Pub. No.: US 2009/0274619 A1
(43) Pub. Date: Nov. 5, 2009

(54) TUMOR VASCULATURE MARKERS AND METHODS OF USE THEROF

(76) Inventors: George Coukos, Wynnewood, PA (US); Ronald J. Buckanovich, Ann Arbor, MI (US); Phyllis A. Gimotty, Philadelphia, PA (US)

Correspondence Address: Pearl Cohen Zedek Latzer, LLP, 1500 Broadway, 12th Floor, New York, NY, 10036, US

(21) Appl. No.: 12/162,235

(22) PCT Filed: Jan. 25, 2007
(86) PCT No.: PCT/US07/01959

§ 371 Date: Jan. 9, 2009

Related U.S. Application Data
(60) Provisional application No. 60/762,787, filed on Jan. 26, 2006.
(60) Provisional application No. 60/791,212, filed on Apr. 12, 2006.
(60) Provisional application No. 60/844,347, filed on Sep. 14, 2006.

(51) Int. Cl. A61K 51/00; A61K 49/00; A61K 39/395; A61K 31/7105; G01N 33/48; C12Q 1/04; C12Q 1/68; C07K 7/00; C07K 16/30

(52) U.S. Cl. 424/1.49; 424/9.1; 424/178.1; 514/44 A; 436/64; 435/34; 435/6; 530/326; 530/387.9

(57) ABSTRACT

This invention provides methods of detecting and localizing tumor vasculature cells (TVC) and solid tumors; and treating, impeding vascularization of, and determining the stage of solid tumors in a subject, comprising the step of contacting a subject or a TVC with a ligand that binds to a nucleic acid molecule of the present invention, or binds to a protein encoded by the nucleic acid molecule.

### FIELD OF INVENTION

[0001] This invention provides methods of detecting and localizing tumor vasculature cells (TVC) and solid tumors; and treating, impeding vascularization of, and determining the stage of solid tumors in a subject, comprising the step of contacting a subject or a TVC with a ligand that binds to a nucleic acid molecule of the present invention, or binds to a protein encoded by the nucleic acid molecule.

### BACKGROUND OF THE INVENTION

[0002] Markers of solid tumors and their vasculature have been difficult to identify because of difficulty in isolating these cells in contaminant-free preparations. Such markers are urgently need for use in a variety of therapeutic and diagnostic applications.

### SUMMARY OF THE INVENTION

[0003] This invention provides methods of detecting and localizing tumor vasculature cells (TVC) and solid tumors; and treating, impeding vascularization of, and determining the stage of solid tumors in a subject, comprising the step of contacting a subject or a TVC with a ligand that binds to a nucleic acid molecule of the present invention, or binds to a protein encoded by the nucleic acid molecule.

[0004] In one embodiment, the present invention provides a use of a ligand that binds a DR6-encoding nucleic acid molecule or that binds a DR6 protein in the manufacture of a kit of apparatus for localizing a solid tumor vasculature in a subject. In another embodiment, the subject is contacted with the kit, the apparatus, or a component thereof, and the ligand is localized, thereby localizing the solid tumor vasculature. In another embodiment, the solid tumor is an ovarian tumor. In another embodiment, the solid tumor is any other type of solid tumor known in the art. Each possibility represents a separate embodiment of the present invention.

[0005] In another embodiment, the present invention provides a use of a ligand that binds an ADAM12-encoding nucleic acid molecule or that binds an ADAM12 protein in the manufacture of a kit of apparatus for localizing a solid tumor vasculature in a subject. In another embodiment, the subject is contacted with the kit, the apparatus, or a component thereof, and the ligand is localized, thereby localizing the solid tumor vasculature. In another embodiment, the solid tumor is an ovarian tumor. In another embodiment, the solid tumor is any other type of solid tumor known in the art. In another embodiment, the ADAM12-encoding nucleic acid molecule or ADAM12 protein is a short isoform thereof. In another embodiment, the nucleotide or protein is any other isoform known in the art. Each possibility represents a separate embodiment of the present invention.

[0006] In another embodiment, the present invention provides a use of a ligand that binds a long isoform of an ADAM12-encoding nucleic acid molecule or an ADAM12 protein, in the manufacture of a kit of apparatus for localizing a solid tumor vasculature in a subject. In another embodiment, the subject is contacted with the kit, the apparatus, or a component thereof, and the ligand is localized, thereby localizing the solid tumor vasculature. In another embodiment, the solid tumor is an ovarian tumor. In another embodiment, the solid tumor is any other type of solid tumor known in the art. Each possibility represents a separate embodiment of the present invention.

[0007] In another embodiment, the present invention provides a use of a ligand that binds a CDCP1-CUB-encoding nucleic acid molecule or a CDCP1-CUB protein in the manufacture of a kit of apparatus for localizing a solid tumor vasculature in a subject. In another embodiment, the subject is contacted with the kit, the apparatus, or a component thereof, and the ligand is localized, thereby localizing the solid tumor vasculature. In another embodiment, the solid tumor is an ovarian tumor. In another embodiment, the solid tumor is any other type of solid tumor known in the art. In another embodiment, the CDCP1-CUB-encoding nucleic acid molecule or CDCP1-CUB protein is a long isoform thereof. In another embodiment, the nucleotide or protein is any other isoform known in the art. Each possibility represents a separate embodiment of the present invention.

[0008] In another embodiment, the present invention provides a use of a ligand that binds a short isoform of a CDCP1-CUB-encoding nucleic acid molecule or a CDCP1-CUB protein in the manufacture of a kit of apparatus for localizing a solid tumor vasculature in a subject. In another embodiment, the subject is contacted with the kit, the apparatus, or a component thereof, and the ligand is localized, thereby localizing the solid tumor vasculature. In another embodiment, the solid tumor is an ovarian tumor. In another embodiment, the solid tumor is any other type of solid tumor known in the art. Each possibility represents a separate embodiment of the present invention.

[0009] In another embodiment, the present invention provides a use of a ligand that binds a SLC11A1-NRAMP-encoding nucleic acid molecule or that binds a SLC11A1-NRAMP protein, in the manufacture of a kit of apparatus for localizing a solid tumor vasculature in a subject. In another embodiment, the subject is contacted with the kit, the apparatus, or a component thereof, and the ligand is localized, thereby localizing the solid tumor vasculature. In another embodiment, the solid tumor is an ovarian tumor. In another embodiment, the solid tumor is any other type of solid tumor known in the art. Each possibility represents a separate embodiment of the present invention.

[0010] In another embodiment, the present invention provides a use of a ligand that binds a BLAME/SLAMF8-encoding nucleic acid molecule or that binds a BLAME/SLAMF8 protein, in the manufacture of a kit of apparatus for localizing a solid tumor vasculature in a subject. In another embodiment, the subject is contacted with the kit, the apparatus, or a component thereof, and the ligand is localized, thereby localizing the solid tumor vasculature. In another embodiment, the solid tumor is an ovarian tumor. In another embodiment, the solid tumor is any other type of solid tumor known in the art. Each possibility represents a separate embodiment of the present invention.

[0011] In another embodiment, the present invention provides a use of a ligand that binds an ESM1-encoding nucleic acid molecule or that binds an ESM1 protein, in the manufacture of a kit of apparatus for localizing a solid tumor vasculature in a subject. In another embodiment, the subject is contacted with the kit, the apparatus, or a component thereof, and the ligand is localized, thereby localizing the solid tumor vasculature. In another embodiment, the solid tumor is a renal tumor. In another embodiment, the solid tumor is any other type of solid tumor known in the art. Each possibility represents a separate embodiment of the present invention.

[0012] In another embodiment, the present invention provides a use of a ligand that binds an EGFL6-encoding nucleic acid molecule or that binds an EGFL6 protein, in the manufacture of a kit of apparatus for localizing a solid tumor vasculature in a subject. In another embodiment, the subject is contacted with the kit, the apparatus, or a component thereof, and the ligand is localized, thereby localizing the solid tumor vasculature. In another embodiment, the solid tumor is an ovarian tumor. In another embodiment, the solid tumor is any other type of solid tumor known in the art. Each possibility represents a separate embodiment of the present invention.

[0013] In another embodiment, the present invention provides a use of a ligand that binds an FZD10-encoding nucleic acid molecule or that binds an FZD10 protein, in the manufacture of a kit of apparatus for localizing a solid tumor vasculature in a subject. In another embodiment, the subject is contacted with the kit, the apparatus, or a component thereof, and the ligand is localized, thereby localizing the solid tumor vasculature. In another embodiment, the solid tumor is an ovarian tumor. In another embodiment, the solid tumor is any other type of solid tumor known in the art. Each possibility represents a separate embodiment of the present invention.

[0014] In another embodiment, the present invention provides a use of a ligand that binds a COL11A1-encoding nucleic acid molecule or that binds a COL11A1 protein, in the manufacture of a kit of apparatus for localizing a solid tumor vasculature in a subject. In another embodiment, the subject is contacted with the kit, the apparatus, or a component thereof, and the ligand is localized, thereby localizing the solid tumor vasculature. In another embodiment, the solid tumor is a breast cancer tumor. In another embodiment, the solid tumor is any other type of solid tumor known in the art. Each possibility represents a separate embodiment of the present invention.

[0015] In another embodiment, the present invention provides a use of a ligand that binds a TNFAIP6-encoding nucleic acid molecule or that binds a TNFAIP6 protein, in the manufacture of a kit of apparatus for localizing a solid tumor vasculature in a subject. In another embodiment, the subject is contacted with the kit, the apparatus, or a component thereof, and the ligand is localized, thereby localizing the solid tumor vasculature. In another embodiment, the solid tumor is an ovarian tumor. In another embodiment, the solid tumor is any other type of solid tumor known in the art. Each possibility represents a separate embodiment of the present invention.

[0016] In another embodiment, the present invention provides a use of a ligand that binds an Adlican-encoding nucleic acid molecule or that binds an Adlican protein, in the manufacture of a kit of apparatus for localizing a solid tumor vasculature in a subject. In another embodiment, the subject is contacted with the kit, the apparatus, or a component thereof, and the ligand is localized, thereby localizing the solid tumor vasculature. In another embodiment, the solid tumor is an ovarian tumor. In another embodiment, the solid tumor is any other type of solid tumor known in the art. Each possibility represents a separate embodiment of the present invention.

[0017] In another embodiment, the present invention provides a use of a ligand that binds a nucleic acid molecule selected from DSG2, c6orf55, SCGB2A1, EPST11, SEC23B, MS4A6A, LOC51136, KCNE3, KCNE4, c14orf100, C2orf6, KCNK5, C14orf28, PCDHB2, ST14, OLFML2B, GPR105, SDC1, FLJ46072, IVNS1ABP, SPP1, DKFZp762e1312, WFDC2, KIAA1892, C6orf69, and KIBRA, in the manufacture of a kit of apparatus for localizing a solid tumor vasculature in a subject. In another embodiment, the subject is contacted with the kit, the apparatus, or a component thereof, and the ligand is localized, thereby localizing the solid tumor vasculature. In another embodiment, the solid tumor is an ovarian tumor. In another embodiment, the solid tumor is any other type of solid tumor known in the art. Each possibility represents a separate embodiment of the present invention.

[0018] In another embodiment, the present invention provides a use of a ligand that binds a nucleic acid molecule that encodes a protein selected from DSG2, c6orf55, SCGB2A1, EPST11, SEC23B, MS4A6A, LOC51136, KCNE3, KCNE4, c14orf100, C2orf6, KCNK5, C14orf28, PCDHB2, ST14, OLFML2B, GPR105, SDC1, FLJ46072, IVNS1ABP, SPP1, DKFZp762e1312, WFDC2, KIAA1892, C6orf69, and KIBRA, in the manufacture of a kit of apparatus for localizing a solid tumor vasculature in a subject. In another embodiment, the subject is contacted with the kit, the apparatus, or a component thereof, and the ligand is localized, thereby localizing the solid tumor vasculature. In another embodiment, the solid tumor is an ovarian tumor. In another embodiment, the solid tumor is any other type of solid tumor known in the art. Each possibility represents a separate embodiment of the present invention.

[0019] In another embodiment, the present invention provides a use of a protein selected from DSG2, c6orf55, SCGB2A1, EPSTI1, SEC23B, MS4A6A, LOC51136, KCNE3, KCNE4, c14orf100, C2orf6, KCNK5, C14orf28, PCDHB2, ST14, OLFML2B, GPR105, SDC1, FLJ46072, IVNS1ABP, SPP1, DKFZp762e1312, VFDC2, KIAA1892, C6orf69, and KIBRA, in the manufacture of a kit of apparatus for localizing a solid tumor vasculature in a subject. In another embodiment, the subject is contacted with the kit, the apparatus, or a component thereof, and the ligand is localized, thereby localizing the solid tumor vasculature. In another embodiment, the solid tumor is an ovarian tumor. In another embodiment, the solid tumor is any other type of solid tumor known in the art. Each possibility represents a separate embodiment of the present invention.

[0020] In another embodiment, the present invention provides a use of an antibody or ligand that is conjugated to a cytotoxic agent or cytotoxic drug and that binds a nucleic acid molecule selected from DR6, ADAM12, CDCP1-CUB, SLC11A1-NRAMP, BLAME/SLAMF8, EGFL6, FZD10, TNFAIP6, Adlican, DSG2, c6orf55, SCGB2A1, EPSTI1, SEC23B, MS4A6A, LOC51136, KCNE3, KCNE4, c14orf100, C2orf6, KCNK5, C14orf28, PCDHB2, ST14, OLFML2B, GPR105, SDC1, FLJ46072, IVNS1ABP, SPP1, DKFZp762e1312, WFDC2, KIAA1892, C6orf69, and KIBRA, in the manufacture of a kit of apparatus for treating a solid tumor in a subject. In another embodiment, the subject is contacted with the kit, the apparatus, or a component thereof, thereby treating the solid tumor. In another embodiment, the solid tumor is an ovarian tumor. In another embodiment, the solid tumor is any other type of solid tumor known in the art. Each possibility represents a separate embodiment of the present invention.

[0021] In another embodiment, the present invention provides a use of an antibody or ligand that is conjugated to a cytotoxic agent or cytotoxic drug and that binds a nucleic acid molecule encoding a protein selected from DR6, ADAM12, CDCP1-CUB, SLC11A1-NRAMP, BLAME/SLAMF8, EGFL6, FZD10, TNFAIP6, Adlican, DSG2, c6orf55, SCGB2A1, EPSTI1, SEC23B, MS4A6A, LOC51136, KCNE3, KCNE4, c14orf100, C2orf6, KCNK5, C14orf28, PCDHB2, ST14, OLFML2B, GPR105, SDC1, FLJ46072, IVNS1ABP, SPP1, DKFZp762e1312, WFDC2, KIAA1892, C6orf69, and KIBRA, in the manufacture of a kit of apparatus for treating a solid tumor in a subject. In another embodiment, the subject is contacted with the kit, the apparatus, or a component thereof, thereby treating the solid tumor. In another embodiment, the solid tumor is an ovarian tumor. In another embodiment, the solid tumor is any other type of solid tumor known in the art. Each possibility represents a separate embodiment of the present invention.

[0022] In another embodiment, the present invention provides a use of an antibody or ligand that is conjugated to a cytotoxic agent or cytotoxic drug and that binds a protein selected from DR6, ADAM12, CDCP1-CUB, SLC11A1-NRAMP, BLAME/SLAMF8, EGFL6, FZD10, TNFAIP6, Adlican, DSG2, c6orf55, SCGB2A1, EPSTI1, SEC23B, MS4A6A, LOC51136, KCNE3, KCNE4, c14orf100, C2orf6, KCNK5, C14orf28, PCDHB2, ST14, OLFML2B, GPR105, SDC1, FLJ46072, IVNS1ABP, SPP1, DKFZp762e 312, WFDC2, KIAA1892, C6orf69, and KIBRA, in the manufacture of a kit of apparatus for treating a solid tumor in a subject. In another embodiment, the subject is contacted with the kit, the apparatus, or a component thereof, thereby treating the solid tumor. In another embodiment, the solid tumor is an ovarian tumor. In another embodiment, the solid tumor is any other type of solid tumor known in the art. Each possibility represents a separate embodiment of the present invention.

[0023] In another embodiment, the present invention provides a use of an antibody or ligand that is conjugated to a cytotoxic agent or cytotoxic drug and that binds an ESM1-encoding nucleic acid molecule or an ESM1 protein, in the manufacture of a kit of apparatus for treating a solid tumor in a subject. In another embodiment, the subject is contacted with the kit, the apparatus, or a component thereof, thereby treating the solid tumor. In another embodiment, the solid tumor is a renal tumor. In another embodiment, the solid tumor is any other type of solid tumor known in the art. Each possibility represents a separate embodiment of the present invention.

[0024] In another embodiment, the present invention provides a use of an antibody or ligand that is conjugated to a cytotoxic agent or cytotoxic drug and that binds a COL11A1-encoding nucleic acid molecule or a COL11A1 protein, in the manufacture of a kit of apparatus for treating a solid tumor in a subject. In another embodiment, the subject is contacted with the kit, the apparatus, or a component thereof, thereby treating the solid tumor. In another embodiment, the solid tumor is a breast cancer tumor. In another embodiment, the solid tumor is any other type of solid tumor known in the art. Each possibility represents a separate embodiment of the present invention.

[0025] In another embodiment, the present invention provides a use of a ligand capable of inhibiting an activity of a nucleic acid molecule selected from DR6, ADAM12, CDCP1-CUB, SLC11A1-NRAMP, BLAME/SLAMF8, EGFL6, FZD10, TNFAIP6, Adlican, DSG2, c6orf55, SCGB2A1, EPSTI1, SEC23B, MS4A6A, LOC51136, KCNE3, KCNE4, c14orf100, C2orf6, KCNK5, C14orf28, PCDHB2, ST14, OLFML2B, GPR105, SDC1, FLJ46072, IVNS1ABP, SPP1, DKFZp762e1312, WFDC2, KIAA1892, C6orf69, and KIBRA, in the manufacture of a kit of apparatus for impeding a vascularization of a solid tumor in a subject. In another embodiment, the ligand is taken up by a vasculature cell of the solid tumor, thereby impeding a vascularization of a solid tumor in a subject. In another embodiment, the solid tumor is an ovarian tumor. In another embodiment, the solid tumor is any other type of solid tumor known in the art. Each possibility represents a separate embodiment of the present invention.

[0026] In another embodiment, the present invention provides a use of a ligand capable of inhibiting an activity of a nucleic acid molecule encoding a protein selected from DR6, ADAM12, CDCP1-CUB, SLC11A1-NRAMP, BLAME/SLAMF8, EGFL6, FZD10, TNFAIP6, Adlican, DSG2, c6orf55, SCGB2A1, EPSTI1, SEC23B, MS4A6A, LOC51136, KCNE3, KCNE4, c14orf100, C2orf6, KCNK5, C14orf28, PCDHB2, ST14, OLFML2B, GPR105, SDC1, FLJ46072, IVNS1ABP, SPP1, DKFZp762e1312, WFDC2, KIAA1892, C6orf69, and KIBRA, in the manufacture of a kit of apparatus for impeding a vascularization of a solid tumor in a subject. In another embodiment, the ligand is taken up by a vasculature cell of the solid tumor, thereby impeding a vascularization of a solid tumor in a subject. In another embodiment, the solid tumor is an ovarian tumor. In another embodiment, the solid tumor is any other type of solid tumor known in the art. Each possibility represents a separate embodiment of the present invention.

[0027] In another embodiment, the present invention provides a use of a ligand capable of inhibiting an activity of a protein selected from DR6, ADAM12, CDCP1-CUB, SLC11A1-NRAMP, BLAME/SLAMF8, EGFL6, FZD10, TNFAIP6, Adlican, DSG2, c6orf55, SCGB2A1, EPST11, SEC23B, MS4A6A, LOC51136, KCNE3, KCNE4, c14orf100, C2orf6, KCNK5, C14orf28, PCDHB2, ST14, OLFML2B, GPR105, SDC1, FLJ46072, IVNS1ABP, SPP1, DKFZp762e1312, WFDC2, KIAA1892, C6orf69, and KIBRA, in the manufacture of a kit of apparatus for impeding a vascularization of a solid tumor in a subject. In another embodiment, the ligand is taken up by a vasculature cell of the solid tumor, thereby impeding a vascularization of a solid tumor in a subject. In another embodiment, the solid tumor is an ovarian tumor. In another embodiment, the solid tumor is any other type of solid tumor known in the art. Each possibility represents a separate embodiment of the present invention.

[0028] In another embodiment, the present invention provides a use of a ligand capable of inhibiting an activity of an ESM1-encoding nucleic acid molecule or an ESM1 protein, in the manufacture of a kit of apparatus for impeding a vascularization of a solid tumor in a subject. In another embodiment, the ligand is taken up by a vasculature cell of the solid tumor, thereby impeding a vascularization of a solid tumor in a subject. In another embodiment, the solid tumor is a renal tumor. In another embodiment, the solid tumor is any other type of solid tumor known in the art. Each possibility represents a separate embodiment of the present invention.

[0029] In another embodiment, the present invention provides a use of a ligand capable of inhibiting an activity of a COL11A1-encoding nucleic acid molecule or a COL11A1 protein, in the manufacture of a kit of apparatus for impeding a vascularization of a solid tumor in a subject. In another embodiment, the ligand is taken up by a vasculature cell of the solid tumor, thereby impeding a vascularization of a solid tumor in a subject. In another embodiment, the solid tumor is abreast cancer tumor. In another embodiment, the solid tumor is any other type of solid tumor known in the art. Each possibility represents a separate embodiment of the present invention.

[0030] In another embodiment, the present invention provides a use of a means of detecting a presence of an Adlican protein in a body fluid of the subject, in the manufacture of a kit of apparatus for detecting a presence of a solid tumor in a subject. In another embodiment, the presence in a body fluid of the protein indicates the presence of a solid tumor in the subject. In another embodiment, the solid tumor is an ovarian tumor. In another embodiment, the solid tumor is any other type of solid tumor known in the art. Each possibility represents a separate embodiment of the present invention.

[0031] In another embodiment, the present invention provides a use of a means of detecting a presence of an Adlican-encoding nucleotide molecule in a body fluid of the subject, in the manufacture of a kit of apparatus for detecting a presence of a solid tumor in a subject. In another embodiment, the presence in a body fluid of the protein indicates the presence of a solid tumor in the subject. In another embodiment, the solid tumor is an ovarian tumor. In another embodiment, the solid tumor is any other type of solid tumor known in the art. Each possibility represents a separate embodiment of the present invention.

[0032] In another embodiment, the present invention provides a use of a means of detecting a presence of a DR6 protein in a body fluid of the subject, in the manufacture of a kit of apparatus for detecting a presence of a solid tumor in a subject. In another embodiment, the presence in a body fluid of the protein indicates the presence of a solid tumor in the subject. In another embodiment, the solid tumor is an ovarian tumor. In another embodiment, the solid tumor is any other type of solid tumor known in the art. Each possibility represents a separate embodiment of the present invention.

[0033] In another embodiment, the present invention provides a use of a means of detecting a presence of a DR6-encoding nucleotide molecule in a body fluid of the subject, in the manufacture of a kit of apparatus for detecting a presence of a solid tumor in a subject. In another embodiment, the presence in a body fluid of the protein indicates the presence of a solid tumor in the subject. In another embodiment, the solid tumor is an ovarian tumor. In another embodiment, the solid tumor is any other type of solid tumor known in the art. Each possibility represents a separate embodiment of the present invention.

[0034] In another embodiment, the present invention provides a use of a means of detecting, in a body fluid of the subject, a presence of a protein selected from FLJ46072, IVNS1ABP, SPP1, TNPAIP6, DKFZp762e1312, WFDC2, KIAA1892, C6orf69, and KIBRA, in the manufacture of a kit of apparatus for detecting a presence of a solid tumor in a subject. In another embodiment, the presence in a body fluid of the protein indicates the presence of a solid tumor in the subject. In another embodiment, the solid tumor is an ovarian tumor. In another embodiment, the solid tumor is any other type of solid tumor known in the art. Each possibility represents a separate embodiment of the present invention.

[0035] In another embodiment, the present invention provides a use of a means of detecting, in a body fluid of the subject, a presence of a nucleotide that encodes a protein selected from FLJ46072, IVNS1ABP, SPP1, TNPAIP6, DKFZp762e1312, WFDC2, KIAA1892, C6orf69, and BRA, in the manufacture of a kit of apparatus for detecting a presence of a solid tumor in a subject. In another embodiment, the presence in a body fluid of the protein indicates the presence of a solid tumor in the subject. In another embodiment, the solid tumor is an ovarian tumor. In another embodiment, the solid tumor is any other type of solid tumor known in the art. Each possibility represents a separate embodiment of the present invention.

[0036] In another embodiment, the present invention provides a use of a means of detecting a presence of a COL11A1 protein in a body fluid of the subject, in the manufacture of a kit of apparatus for detecting a presence of a solid tumor in a subject. In another embodiment, the presence in a body fluid of the protein indicates the presence of a solid tumor in the subject. In another embodiment, the solid tumor is a breast cancer tumor. In another embodiment, the solid tumor is any other type of solid tumor known in the art. Each possibility represents a separate embodiment of the present invention.

[0037] In another embodiment, the present invention provides a use of a means of detecting a presence of a nucleotide molecule encoding a COL11A1 protein in a body fluid of the subject, in the manufacture of a kit of apparatus for detecting a presence of a solid tumor in a subject. In another embodiment, the presence in a body fluid of the protein indicates the presence of a solid tumor in the subject. In another embodiment, the solid tumor is a breast cancer tumor. In another embodiment, the solid tumor is any other type of solid tumor known in the art. Each possibility represents a separate embodiment of the present invention.

[0038] In another embodiment, the present invention provides a peptide having the amino acid sequence CPGAKALSRVREDIVEDE (SEQ ID No: 88).

[0039] In another embodiment, the present invention provides an antibody that recognizes a peptide of the present invention.

[0040] In another embodiment, the present invention provides a use of a ligand or molecule that binds a TVM of the present invention in the manufacture of a kit or apparatus for treating a solid tumor in a subject. In another embodiment, the solid tumor is localized with a kit or apparatus of the present invention and then irradiated. In another embodiment, the solid tumor is an ovarian tumor. In another embodiment, the solid tumor is a breast cancer tumor. In another embodiment, the solid tumor is a renal tumor. In another embodiment, the solid tumor is any other type of solid tumor known in the art. Each possibility represents a separate embodiment of the present invention.

[0041] In another embodiment, the present invention provides a use of a ligand or molecule that binds a TVM of the present invention in the manufacture of a kit or apparatus for treating a solid tumor in a subject. In another embodiment, the subject is contacted with a photo-activatable cytotoxic drug or pharmaceutical composition, and the solid tumor is localized with a kit or apparatus of the present invention and contacted with a concentrated light source. In another embodiment, the solid tumor is an ovarian tumor. In another embodiment, the solid tumor is a breast cancer tumor. In another embodiment, the solid tumor is a renal tumor. In another embodiment, the solid tumor is any other type of solid tumor known in the art. Each possibility represents a separate embodiment of the present invention.

### BRIEF DESCRIPTION OF THE FIGURES

[0042] FIG. 1: A. Immuno-LCM steps. Left panel: Rapid IHC for CD31 allows prompt identification of vasculature in ovarian cancer frozen sections. Middle panel: Tissue section after LCM of CD31⁺ cells. Right panel: captured tumor vascular cells. B. RT-PCR analysis of lineage-specific markers in RNA from tumor vascular cells (TVC) isolated with immuno-LCM, whole tumor (Tum) or a no template control (NTC). C. Scatter plot and correlation value of amplified RNA from unstained tissue (Pre IHC) versus RNA amplified after IHC optimized as in Table 1 (Post IHC). D. Part 1. Heat map condition tree developed using a hierarchical clustering algorithm, excluding all genes where the difference between the means of the tumor and normal vascular samples was less than its standard error. D, part 2: Red color shown alone. D, part 3: Green color shown alone. E. Archived Gene Expression Datasets. Data used for expression of the TVM in normal and tumor tissue samples; also available in the Gene Expression Omnibus (GEO; National Center for Biotechnology Information [NCBI]) with series numbers GSE3526 and GSE2109, respectively. All CEL-files were similarly processed using the Robust Multi-array Average (RMA) algorithm.

[0043] FIG. 2. Quality of total RNA isolated from 8 μm frozen ovarian cancer tissue sections through different methodologies and analyzed by Agilent Bioanalyzer (A-E), quantitative real-time PCR (F) or Affymetrix U133A arrays (G). A. RNA distribution profiles following fixation with different fixatives. (Lanes: 1, ethanol; 2, methanol; 3, acetone; 4, acetic acid+ethanol; 5, paraformaldehyde). B. RNA profiles after isolation without immunostaining (Lane 1) or following IHC with or without RNAse inhibitor. (Lanes: 2, RNA Protector; 3, Placental RNAse inhibitor; 4, SuperRNASin; 5, RNA Protector+SuperRNASin; 6, no RNAse inhibitor. C. RNA profiles after different immunostaining procedures. (Lanes: 1, IHC using DAB; 2, IHC using AEC; 3, immunofluorescence). D. Time course demonstrating RNA stability after IHC performed with procedure optimized as in Table 1. (Lanes: 1, 0 min; 2, 30 min; 3, one hr; 4, two hrs; 5, three hrs). E. RNA profiles following different RNA isolation methods. (Lanes: 1, Arcturus kit; 2, Stratagene kit; 3, modified Trizol; 4, Zymo kit). F. qRT-PCR for β-actin transcripts with RNA purified with the indicated RNA purification protocols. G. Scatter plots and correlation values of amplified RNA (y-axis) to unamplified total tumor RNA (x-axis).

[0044] FIG. 3: Expression of novel TVM. A. qRT-PCR analysis of tumor vascular markers (TVM) in whole epithelial ovarian cancer (Ovarian Ca, n=20) and normal ovaries (Nml Ovary, n=5). Results are expressed as relative expression units against β-actin. B. Expression of select TVM by qRT-PCR in a panel of normal human tissues (Sm Intest, small intestine; Sk Muscle, skeletal muscle); expression in ovarian cancer (Ov Ca) is defined as 100%. C. Expression of select TVM by qRT-PCR in different tumor types; expression in ovarian cancer is defined as 100%. Data were normalized against CD31. D. Expression of TVM in tissues with physiologic angiogenesis including corpus luteum (Corp Lut); proliferative endometrium (Prolif Endomet); and placenta, as well as ovarian cancer (Ov Ca). Data were normalized against CD31. E. Expression of TVM in normal human tissues by digital northern derived from the NIH SAGE expression database. Sp Ch (spinal cord), Kid (kidney, Ov (ovary), Lym (lymph node), BM (bone marrow), Vasc (vasculature). Squares with 32-63 tags are indicated by a double arrow to the left. Squares with 16-31 tags have a single arrow to the left. The remainder of the light-colored squares had 15 or fewer tags. “EPB41L3” refers to EPB41L3. This figure also includes additional markers that do not appear in Table 5; selection of these additional markers is described below in Example 11.

[0045] FIG. 4. Part 1. Immuno-localization of identified markers to tumor vasculature. IHC is shown for CD24, endothelial lipase (Endo Lipase), FolH1 and AML-1. Immunofluorescent localization of SPON-1 to vascular structures and co-staining of PAR2, STC2 and AML-1 (red) with CD31 (green) in microvascular structures in human ovarian tumors. Merge includes nuclear staining with DAPI. Red fluorescence is shown alone in part 2. Green fluorescence is shown alone in part 3. Blue fluorescence from DAPI is shown alone in part 4.

[0046] FIG. 5. A. In-situ hybridization demonstrates expression of mRNA for the indicated tumor vascular markers in association with vascular structures in ovarian cancer. Negative controls included hybridization of tumor section with sense strand (Sense), hybridization of normal ovary with antisense probe (Nml Ov) and hybridization of RNAse-pretreated tumor section with antisense probe (RNAse Tx) for all TVM. Representative controls are shown for adlican, but were identical for all TVM. Merge is shown with DAPI nuclear staining. Red fluorescence is shown alone in part 2. Blue fluorescence from DAPI is shown alone in part 3.

[0047] FIG. 6. Expression of select TVM by qRT-PCR in FACS-purified VE-cadherin⁺ CD146⁺ CD45⁻ tumor endothelial cells (TEC) and VE-cadherin⁺ CD146⁺ CD45⁺ vascular leukocytes (VLC) compared with peripheral blood mononuclear cells (PBMC). Data were normalized against β-actin.

[0048] FIG. 7, part 1. Expression of novel human TVM by myeloid monocytic cells. A. Flow cytometry analysis; Top, Expression of CD45 (x-axis) and VE-cadherin (y-axis) in DC derived from PBMC prior to exposure to rhVEGF₁₆₅ (Pre VEGF-A) and following 7-day treatment with rhVEGF₁₆₅ (Post VEGF-A); VE-cadherin⁺ CD45⁺ cells appear after VEGF165 treatment. Middle, Expression of CD45 and VE-cadherin in DC derived from enriched monocytes prior to (Pre VEGF-A) and following 7-day treatment with rhVEGF₁₆₅ (Post VEGF-A); 91% of output cells after VEGF₁₆₅ treatment were VE-cadherin⁺CD45⁺, indicating that double positive cells derived from the monocyte fraction. Bottom, No significant CFSE dilution was noted in monocyte-derived DC after VEGF₁₆₅ treatment, indicating no cell proliferation in these cultures. B. Expression of markers by PBMC-derived DC at baseline (Day 0) and following exposure to rhVEGF₁₆₅, with or without antibody against VEGF-A for 2 weeks. Induction of several tumor vascular markers and suppression of AML-1 and LZTS1 are observed after VEGF₁₆₅. This was abrogated by VEGF blockade, except for AML-1 and LTZS1. Data were normalized against β-actin. C. Expression of TVM in human 2008 ovarian cancer xenografts injected alone (2008) or enriched with human PBMC-derived DC pretreated with VEGF₁₆₅ ex vivo (DC), FACS-purified human tumor endothelial cells (TEC) or FACS-purified human tumor vascular leukocytes (VLC). TVM are expressed by xenografts enriched with human myeloid cells or TEC but not by xenografts generated with human tumor cells only. Data were normalized against human β-actin. D. Immunofluorescent detection of human CD34⁺ vascular structures within 2008 tumors supplemented with human PBMC-derived DC pretreated with VEGF₁₆₅: 1: One CD34-PE positive vessel was noted in the early tumor xenograft. 2 and 3: Merge of CD34-PE and DAPI depicts vascular structures at higher magnification. 4: Control tumor generated with 2008 cells alone without VEGF-pretreated DC, TEC or VLC shows no expression of human CD34. Similar results were obtained with immunostaining for human CD31. E. Raw data described in legend for FIG. 7C.

[0049] FIG. 7, parts 2-3. Red fluorescence is shown alone in part 2. Blue fluorescence from DAPI is shown alone in part 3.

[0050] FIG. 8, part 1. Secreted (sec) and transmembrane (TM) TVM. Column 1: expression rank (described in Example 2). Column 2: “Scnt”: The number of normal samples that ranked in the bottom 4 positions. (e.g. if snt=4, the 4 lowest expressing samples are all normal samples). Column 3: Gene symbol. Column 4: Number of normal samples (4 total) in which the transcript was classified as present. Column 5: Number of tumor samples (21 total) in which the transcript was classified as present. Column 6: Mean signal from the tumor samples. Column 7: Mean signal from the normal samples. Column 8: Fold increase of expression in tumor samples. Column 9: foldc3: Value of 1 means that the fold change was (>3). 2 fold change was (<3). Column 10: srank25. 1 means that the sum of ranks <25. Criteria for this list was a value of “1” in at least one of column 9 and column 10.

[0051] FIG. 8, part 2. Column 1: Gene symbol. Column 2: Localization. Column 3: Description. Column 4: Available antibodies. Abbreviations: Pred: predicted; Mb: membrane; EC: extracellular; ECM extracellular matrix; PM: plasma membrane.

[0052] FIG. 9. A. Real-time PCR analysis of Adlican in normal tissues and ovarian cancer. B. In situ hybridization of adlican in ovarian cancer. C. Real-time PCR analysis of adlican in ovarian tumors. D. Western blot shows adlican protein in tumor tissue lysate (T1-3) but not normal ovary (Nml) (left) and in serum (S1-2) and ascites (A1-2) of patients with ovarian cancer but not normal human serum (NHS).

[0053] FIG. 10. Model of step-wise vascular differentiation of monocyte-derived DC precursors in tumors. VEGF-A alone induces in monocytes downregulation of transcriptional regulators AML-1 and LZTS1, while newly identified markers (collagen 11α1, DR6, FZD10, GPM6B, SCP1 and SPON-1) as well as known endothelial markers (VE-cadherin, TEM-1) are upregulated, yielding VLC. Additional factors from the tumor microenvironment cooperate with VEGF-A to induce additional TVM found in TEC, as myeloid cells structurally participate in the assembly of vasculature.

[0054] FIG. 11. Additional TVM.

[0055] FIG. 12. List of additional TVM from another analysis.

[0056] FIG. 13. A. DR6 mRNA expression by qPCR in normal tissues and ovarian tumor. B-D. IHC of DR6 in ovarian tumor (B), high-magnification image thereof (C), and normal ovary tissue (D).

[0057] FIG. 14. DR6 protein is detected at higher levels in the serum of patients with ovarian tumors compared to healthy individuals. A—Western. B—quantitation.

[0058] FIG. 15. Quantitation of ADAM12 mRNA relative expression by qPCR in normal tissues and ov tumor. A. Long isoform. B. Short isoform.

[0059] FIG. 16. Staining with anti-ADAM12 Ab in frozen ovarian tumor sections

[0060] FIG. 17. Double fluorescent staining with anti-ADAM12 Ab (red in original) and anti-CD31 Ab (green in original) in frozen ovarian tumor sections. Nuclei are stained blue. Top panel: green color alone (appears as white). Bottom: red color alone (appears as white).

[0061] FIG. 18. Double fluorescent staining with anti-ADAM12 Ab (red in original) and anti-CD45 Ab (green in original) in frozen ovarian tumor sections. Nuclei are stained blue. Top panel: green color alone (appears as white). Bottom: orange color alone, representing overlap of green and red staining (appears as white).

[0062] FIG. 19. CDCP1 mRNA relative expression in normal tissues and ovarian tumor (qPCR). A. Long isoform. B. Short isoform. Bars represent, from left to right: Ovarian tumor, bladder, esophagus, colon, liver, lung, brain, cervix, kidney, heart, adipose, testes, thymus, skeletal muscle, small intestine, spleen, trachea, ovary, placenta, thyroid, prostate.

[0063] FIG. 20. Staining with anti-CDCP1 Ab in frozen ovarian tumor sections.

[0064] FIG. 21. SLC11A1 mRNA expression by qPCR in normal tissues and ovarian tumor.

[0065] FIG. 22. Staining with anti-SLC11A1 Ab in frozen ovarian tumor sections. Left panels: sample from first patient, at low (top) and high (bottom) magnification. Right panels: sample from second patient, at low (top) and high (bottom) magnification.

[0066] FIG. 23. Double fluorescent staining with anti-SLC11A1 Ab (red in original) and anti-CD31 Ab (green in original) in frozen ovarian tumor sections. Nuclei are stained blue. A: green color alone (appears as white). B: red color alone (appears as white).

[0067] FIG. 24. Double fluorescent staining with anti-SLC11A1 Ab (red in original) and anti-CD45 Ab (green in original) in frozen ovarian tumor sections. Nuclei are stained blue. A: green color alone (appears as white). B: orange color alone, representing overlap of green and red staining (appears as white).

[0068] FIG. 25. BLAME mRNA expression by qPCR in normal tissues and ovarian tumor.

[0069] FIG. 26. Staining with anti-BLAME Ab in frozen ovarian tumor sections. A: samples from 2 patients at low magnification (40×). B: samples from 2 patients at high magnification (60×).

[0070] FIG. 27. A-B. Double fluorescent staining with anti-BLAME Ab (red in original) and anti-CD31 Ab (green in original) in frozen ovarian tumor sections. Nuclei are stained blue. A: green color alone. B: red color alone. C-E. Double fluorescent staining with anti-BLAME Ab (red in original) and anti-CD45 Ab (green in original) in frozen ovarian tumor sections. Nuclei are stained blue. C: green color alone. D: red color alone. E. orange color alone, representing overlap of green and red staining. Selected color (green; red, or orange) appears as white in each panel.

### DETAILED DESCRIPTION OF THE INVENTION

[0071] This invention provides methods of detecting and localizing tumor vasculature cells (TVC) and solid tumors; and treating, impeding vascularization of, and determining the stage of solid tumors in a subject, comprising the step of contacting a subject or a TVC with a ligand that binds to a nucleic acid molecule of the present invention, or binds to a protein encoded by the nucleic acid molecule.

[0072] In one embodiment, the present invention provides a method of localizing a solid tumor vasculature in a subject, the method comprising the steps of: (a) contacting the subject with a ligand that binds a DR6-encoding nucleic acid molecule or that binds a DR6 protein; and (b) localizing the ligand, thereby localizing a solid tumor vasculature in a subject. In another embodiment, the solid tumor is an ovarian tumor. In another embodiment, the solid tumor is any other type of solid tumor known in the art. Each possibility represents a separate embodiment of the present invention.

[0073] In another embodiment, the present invention provides a method of localizing a solid tumor vasculature in a subject, the method comprising the steps of: (a) contacting the subject with a ligand that binds an ADAM12-encoding nucleic acid molecule or that binds an ADAM12 protein; and (b) localizing the ligand, thereby localizing a solid tumor vasculature in a subject. In another embodiment, the solid tumor is an ovarian tumor. In another embodiment, the solid tumor is any other type of solid tumor known in the art. In another embodiment, the ADAM12-encoding nucleic acid molecule or ADAM12 protein is a short isoform thereof. In another embodiment, the nucleotide or protein is any other isoform known in the art. Each possibility represents a separate embodiment of the present invention.

[0074] In another embodiment, the present invention provides a method of localizing a solid tumor vasculature in a subject, the method comprising the steps of: (a) contacting the subject with a ligand that binds a long isoform of an ADAM12-encoding nucleic acid molecule or an ADAM12 protein; and (b) localizing the ligand, thereby localizing a solid tumor vasculature in a subject. In another embodiment, the solid tumor is an ovarian tumor. In another embodiment, the solid tumor is any other type of solid tumor known in the art. Each possibility represents a separate embodiment of the present invention.

[0075] In another embodiment, the present invention provides a method of localizing a solid tumor vasculature in a subject, the method comprising the steps of: (a) contacting the subject with a ligand that binds a CDCP1-CUB-encoding nucleic acid molecule or that binds a CDCP1-CUB protein; and (b) localizing the ligand, thereby localizing a solid tumor vasculature in a subject. In another embodiment, the solid tumor is an ovarian tumor. In another embodiment, the solid tumor is any other type of solid tumor known in the art. In another embodiment, the CDCP1-CUB-encoding nucleic acid molecule or CDCP1-CUB protein is a long isoform thereof. In another embodiment, the nucleotide or protein is any other isoform known in the art. Each possibility represents a separate embodiment of the present invention.

[0076] In another embodiment, the present invention provides a method of localizing a solid tumor vasculature in a subject, the method comprising the steps of: (a) contacting the subject with a ligand that binds a short isoform of a CDCP1-CUB-encoding nucleic acid molecule or a CDCP1-CUB protein; and (b) localizing the ligand, thereby localizing a solid tumor vasculature in a subject. In another embodiment, the solid tumor is an ovarian tumor. In another embodiment, the solid tumor is any other type of solid tumor known in the art. Each possibility represents a separate embodiment of the present invention.

[0077] In another embodiment, the present invention provides a method of localizing a solid tumor vasculature in a subject, the method comprising the steps of: (a) contacting the subject with a ligand that binds a SLC11A1-NRAMP-encoding nucleic acid molecule or that binds a SLC11A1-NRAMP protein; and (b) localizing the ligand, thereby localizing a solid tumor vasculature in a subject. In another embodiment, the solid tumor is an ovarian tumor. In another embodiment, the solid tumor is any other type of solid tumor known in the art. Each possibility represents a separate embodiment of the present invention.

[0078] In another embodiment, the present invention provides a method of localizing a solid tumor vasculature in a subject, the method comprising the steps of: (a) contacting the subject with a ligand that binds a BLAME/SLAMF8-encoding nucleic acid molecule or that binds a BLAME/SLAMF8 protein; and (b) localizing the ligand, thereby localizing a solid tumor vasculature in a subject. In another embodiment, the solid tumor is an ovarian tumor. In another embodiment, the solid tumor is any other type of solid tumor known in the art. Each possibility represents a separate embodiment of the present invention.

[0079] In another embodiment, the present invention provides a method of localizing a solid tumor vasculature in a subject, the method comprising the steps of: (a) contacting the subject with a ligand that binds an ESM1-encoding nucleic acid molecule or that binds an ESM1 protein; and (b) localizing the ligand, thereby localizing a solid tumor vasculature in a subject. In another embodiment, the solid tumor is a renal tumor. In another embodiment, the solid tumor is any other type of solid tumor known in the art. Each possibility represents a separate embodiment of the present invention.

[0080] In another embodiment, the present invention provides a method of localizing a solid tumor vasculature in a subject, the method comprising the steps of: (a) contacting the subject with a ligand that binds an EGFL6-encoding nucleic acid molecule or that binds an EGFL6 protein; and (b) localizing the ligand, thereby localizing a solid tumor vasculature in a subject. In another embodiment, the solid tumor is an ovarian tumor. In another embodiment, the solid tumor is any other type of solid tumor known in the art. Each possibility represents a separate embodiment of the present invention.

[0081] In another embodiment, the present invention provides a method of localizing a solid tumor vasculature in a subject, the method comprising the steps of: (a) contacting the subject with a ligand that binds an FZD10-encoding nucleic acid molecule or that binds an FZD10 protein; and (b) localizing the ligand, thereby localizing a solid tumor vasculature in a subject. In another embodiment, the solid tumor is an ovarian tumor. In another embodiment, the solid tumor is any other type of solid tumor known in the art. Each possibility represents a separate embodiment of the present invention.

[0082] In another embodiment, the present invention provides a method of localizing a solid tumor vasculature in a subject, the method comprising the steps of: (a) contacting the subject with a ligand that binds a COL11A1-encoding nucleic acid molecule or that binds a COL11A1 protein; and (b) localizing the ligand, thereby localizing a solid tumor vasculature in a subject. In another embodiment, the solid tumor is a breast cancer tumor. In another embodiment, the solid tumor is any other type of solid tumor known in the art. Each possibility represents a separate embodiment of the present invention.

[0083] In another embodiment, the present invention provides a method of localizing a solid tumor vasculature in a subject, the method comprising the steps of: (a) contacting the subject with a ligand that binds a TNFAIP6-encoding nucleic acid molecule or that binds a TNFAIP6 protein; and (b) localizing the ligand, thereby localizing a solid tumor vasculature in a subject. In another embodiment, the solid tumor is an ovarian tumor. In another embodiment, the solid tumor is any other type of solid tumor known in the art. Each possibility represents a separate embodiment of the present invention.

[0084] In another embodiment, the present invention provides a method of localizing a solid tumor vasculature in a subject, the method comprising the steps of: (a) contacting the subject with a ligand that binds an Adlican-encoding nucleic acid molecule or that binds an Adlican protein; and (b) localizing the ligand, thereby localizing a solid tumor vasculature in a subject. In another embodiment, the solid tumor is an ovarian tumor. In another embodiment, the solid tumor is any other type of solid tumor known in the art. Each possibility represents a separate embodiment of the present invention.

[0085] In another embodiment, the present invention provides a method of localizing a solid tumor vasculature in a subject, the method comprising the steps of: (a) contacting the subject with a ligand that binds a nucleic acid molecule selected from DSG2, c6orf55, SCGB2A1, EPSTI1, SEC23B, MS4A6A, LOC51136, KCNE3, KCNE4, c14orf100, C2orf6, KCNK5, C14orf28, PCDHB2, ST14, OLPML2B, GPR105, SDC1, FLJ46072, IVNS1ABP, SPP1, DKFZp762e1312, WFDC2, KIAA1892, C6orf69, and KIBRA, and (b) localizing the ligand, thereby localizing a solid tumor vasculature in a subject. In another embodiment, the solid tumor is an ovarian tumor. In another embodiment, the solid tumor is any other type of solid tumor known in the art. Each possibility represents a separate embodiment of the present invention.

[0086] In another embodiment, the present invention provides a method of localizing a solid tumor vasculature in a subject, the method comprising the steps of: (a) contacting the subject with a ligand that binds a nucleic acid molecule that encodes a protein selected from DSG2, c6orf55, SCGB2A1, EPST11, SEC23B, MS4A6A, LOC51136, KCNE3, KCNE4, c14orf100, C2orf6, KCNK5, C14orf28, PCDHB2, ST14, OLFML2B, GPR105, SDC1, FLJ46072, IVNS1ABP, SPP1, DKFZp762e1312, WFDC2, KIAA1892, C6orf69, and KIBRA, and (b) localizing the ligand, thereby localizing a solid tumor vasculature in a subject. In another embodiment, the solid tumor is an ovarian tumor. In another embodiment, the solid tumor is any other type of solid tumor known in the art. Each possibility represents a separate embodiment of the present invention.

[0087] In another embodiment, the present invention provides a method of localizing a solid tumor vasculature in a subject, the method comprising the steps of: (a) contacting the subject with a ligand that binds a protein selected from DSG2, c6orf55, SCGB2A1, EPST11, SEC23B, MS4A6A, LOC51136, KCNE3, KCNE4, c14orf100, C2orf6, KCNK5, C14orf28, PCDHB2, ST14, OLFML2B, GPR105, SDC1, FLJ46072, IVNS1ABP, SPP1, DKFZp762e1312, WFDC2, KIAA1892, C6orf69, and KIBRA, and (b) localizing the ligand, thereby localizing a solid tumor vasculature in a subject. In another embodiment, the solid tumor is an ovarian tumor. In another embodiment, the solid tumor is any other type of solid tumor known in the art. Each possibility represents a separate embodiment of the present invention.

[0088] “Ligand” refers, in another embodiment, to any molecule or structure capable of binding the target molecule. In another embodiment, “ligand” includes antibodies. In another embodiment, the term includes nucleotide molecules that hybridize to a target of interest. In another embodiment, the term includes small molecules with an affinity for the target. Each possibility represents a separate embodiment of the present invention.

[0089] The “means of detecting” a TVM of the present invention can be any means of detecting a nucleotide, protein, or fragment thereof known in the art. Means for detecting nucleotides and proteins in a subject are well known in the art. In another embodiment, the means is Western blotting. In another embodiment, the means is an antibody ELISA kit. In another embodiment, the means is an RT-PCR kit. In another embodiment, the means is an RNA isolation kit. In another embodiment, the means is a cDNA synthesis kit. In another embodiment, the means is any other suitable means known in the art. Each possibility represents a separate embodiment of the present invention.

[0090] In another embodiment, the present invention provides a method of treating a solid tumor in a subject, the method comprising the step of contacting the subject with an antibody or ligand that is conjugated to a cytotoxic agent or cytotoxic drug and that binds a nucleic acid molecule produced by the solid tumor, wherein the nucleic acid molecule is selected from DR6, ADAM12, CDCP1-CUB, SLC11A1-NRAMP, BLAME/SLAMF8, EGFL6, FZD10, TNFAIP6, Adlican, DSG2, c6orf55, SCGB2A1, EPSTI1, SEC23B, MS4A6A, LOC51136, KCNE3, KCNE4, c14orf100, C2orf6, KCNK5, C14orf28, PCDHB2, ST14, OLFML2B, GPR105, SDC1, FLJ46072, IVNS1ABP, SPP1, DKFZp762e1312, WFDC2, KIAA1892, C6orf69, and KIBRA, thereby treating a solid tumor in a subject. In another embodiment, the solid tumor is an ovarian tumor. In another embodiment, the solid tumor is any other type of solid tumor known in the art. Each possibility represents a separate embodiment of the present invention.

[0091] In another embodiment, the present invention provides a method of treating a solid tumor in a subject, the method comprising the step of contacting the subject with an antibody or ligand that is conjugated to a cytotoxic agent or cytotoxic drug and that binds a nucleic acid molecule produced by the solid tumor, wherein the nucleic acid molecule encodes a protein selected from DR6, ADAM12, CDCP1-CUB, SLC11A1-NRAMP, BLAME/SLAMF8, EGFL6, FZD10, TNFAIP6, Adlican, DSG2, c6orf55, SCGB2A1, EPSTI1, SEC2313, MS4A6A, LOC51136, KCNE3, KCNE4, c14orf100, C2orf6, KCNK5, C14orf28, PCDHB2, ST14, OLFML2B, GPR105, SDC1, FLJ46072, IVNS1ABP, SPP1, DKFZp762e1312, WFDC2, KIAA1892, C6orf69, and KIBRA, thereby treating a solid tumor in a subject. In another embodiment, the solid tumor is an ovarian tumor. In another embodiment, the solid tumor is any other type of solid tumor known in the art. Each possibility represents a separate embodiment of the present invention.

[0092] In another embodiment, the present invention provides a method of treating a solid tumor in a subject, the method comprising the step of contacting the subject with an antibody or ligand that is conjugated to a cytotoxic agent or cytotoxic drug and that binds a protein produced by the solid tumor, wherein the protein is selected from DR6, ADAM12, CDCP1-CUB, SLC11A1-NRAMP, BLAME/SLAMF8, EGFL6, FZD10, TNFAIP6, Adlican, DSG2, c6orf55, SCGB2A1, EPST11, SEC23B, MS4A6A, LOC51136, KCNE3, KCNE4, c14orf100, C2orf6, KCNK5, C14orf28, PCDHB2, ST14, OLFML2B, GPR105, SDC1, FLJ46072, IVNS1ABP, SPP1, DKFZp762e1312, VFDC2, KIAA1892, C6orf69, and KIBRA, thereby treating a solid tumor in a subject. In another embodiment, the solid tumor is an ovarian tumor. In another embodiment, the solid tumor is any other type of solid tumor known in the art. Each possibility represents a separate embodiment of the present invention.

[0093] In another embodiment, the present invention provides a method of treating a solid tumor in a subject, the method comprising the step of contacting the subject with an antibody or ligand that is conjugated to a cytotoxic agent or cytotoxic drug and that binds an ESM1-encoding nucleic acid molecule or ESM1 protein expressed by the tumor, thereby treating a solid tumor in a subject. In another embodiment, the solid tumor is a renal tumor. In another embodiment, the solid tumor is any other type of solid tumor known in the art. Each possibility represents a separate embodiment of the present invention.

[0094] In another embodiment, the present invention provides a method of treating a solid tumor in a subject, the method comprising the step of contacting the subject with an antibody or ligand that is conjugated to a cytotoxic agent or cytotoxic drug and that binds a COL11A1-encoding nucleic acid molecule or COL11A1 protein expressed by the tumor, thereby treating a solid tumor in a subject. In another embodiment, the solid tumor is a breast cancer tumor. In another embodiment, the solid tumor is any other type of solid tumor known in the art. Each possibility represents a separate embodiment of the present invention.

[0095] In another embodiment, the present invention provides a method of impeding a vascularization of a solid tumor in a subject, the method comprising the step of contacting the subject with a ligand capable of inhibiting an activity of a nucleic acid molecule selected from DR6, ADAM12, CDCP1-CUB, SLC11A1-NRAMP, BLAME/SLAMF8, EGFL6, FZD10, TNFAIP6, Adlican, DSG2, c6orf55, SCGB2A1, EPST11, SEC23B, MS4A6A, LOC51136, KCNE3, KCNE4, c14orf100, C2orf6, KCNK5, C14orf28, PCDHB2, ST14, OLFML2B, GPR105, SDC1, FLJ46072, IVNS1ABP, SPP1, DKFZp762e1312, WFDC2, KIAA1892, C6orf69, and KIBRA, whereby the ligand is taken up by a vasculature cell of the solid tumor, thereby impeding a vascularization of a solid tumor in a subject. In another embodiment, the solid tumor is an ovarian tumor. In another embodiment, the solid tumor is any other type of solid tumor known in the art. Each possibility represents a separate embodiment of the present invention.

[0096] In another embodiment, the present invention provides a method of impeding a vascularization of a solid tumor in a subject, the method comprising the step of contacting the subject with a ligand capable of inhibiting an activity of a nucleic acid molecule encoding a protein selected from DR6, ADAM12, CDCP1-CUB, SLC11A1-NRAMP, BLAME/SLAMF8, EGFL6, FZD10, TNFAIP6, Adlican, DSG2, c6orf55, SCGB2A1, EPSTI1, SEC23B, MS4A6A, LOC51136, KCNE3, KCNE4, c14orf100, C2orf6, KCNK5, C14orf28, PCDHB2, ST14, OLFML2B, GPR105, SDC1, FLJ46072, IVNS1ABP, SPP1, DKEZp762e1312, WFDC2, KIAA1892, C6orf69, and KIBRA, whereby the ligand is taken up by a vasculature cell of the solid tumor, thereby impeding a vascularization of a solid tumor in a subject. In another embodiment, the solid tumor is an ovarian tumor. In another embodiment, the solid tumor is any other type of solid tumor known in the art. Each possibility represents a separate embodiment of the present invention.

[0097] In another embodiment, the present invention provides a method of impeding a vascularization of a solid tumor in a subject, the method comprising the step of contacting the subject with a ligand capable of inhibiting an activity of a protein selected from DR6, ADAM12, CDCP1-CUB, SLC11A1-NRAMP, BLAME/SLAMF8, EGFL6, FZD10, TNFAIP6, Adlican, DSG2, c6orf55, SCGB2A1, EPST11, SEC23B, MS4A6A, LOC51136, KCNE3, KCNE4, c14orf100, C2orf6, KCNK5, C14orf28, PCDHB2, ST14, OLFML2B, GPR105, SDC1, FLJ46072, IVNS1ABP, SPP1, DKFZp762e1312, WFDC2, KIAA1892, C6orf69, and KIBRA, whereby the ligand is taken up by a vasculature cell of the solid tumor, thereby impeding a vascularization of a solid tumor in a subject. In another embodiment, the solid tumor is an ovarian tumor. In another embodiment, the solid tumor is any other type of solid tumor known in the art. Each possibility represents a separate embodiment of the present invention.

[0098] In another embodiment, the present invention provides a method of impeding a vascularization of a solid tumor in a subject, the method comprising the step of contacting the subject with a ligand capable of inhibiting an activity of an ESM1-encoding nucleic acid molecule or an ESM1 protein, whereby the ligand is taken up by a vasculature cell of the solid tumor, thereby impeding a vascularization of a solid tumor in a subject. In another embodiment, the solid tumor is a renal tumor. In another embodiment, the solid tumor is any other type of solid tumor known in the art. Each possibility represents a separate embodiment of the present invention.

[0099] In another embodiment, the present invention provides a method of impeding a vascularization of a solid tumor in a subject, the method comprising the step of contacting the subject with a ligand capable of inhibiting an activity of a COL11A1-encoding nucleic acid molecule or a COL11A1 protein, whereby the ligand is taken up by a vasculature cell of the solid tumor, thereby impeding a vascularization of a solid tumor in a subject. In another embodiment, the solid tumor is a breast cancer tumor. In another embodiment, the solid tumor is any other type of solid tumor known in the art. Each possibility represents a separate embodiment of the present invention.

[0100] In another embodiment, the present invention provides a method of detecting a presence of a solid tumor in a subject, the method comprising the step of detecting a presence in a body fluid of the subject of an Adlican protein, whereby the presence in a body fluid of the protein indicates the presence of a solid tumor in the subject. In another embodiment, the solid tumor is an ovarian tumor. In another embodiment, the solid tumor is any other type of solid tumor known in the art. Each possibility represents a separate embodiment of the present invention.

[0101] In another embodiment, the present invention provides a method of detecting a presence of a solid tumor in a subject, the method comprising the step of detecting a presence in a body fluid of the subject of an Adlican-encoding nucleotide molecule, whereby the presence in a body fluid of the nucleotide molecule indicates the presence of a solid tumor in the subject. In another embodiment, the solid tumor is an ovarian tumor. In another embodiment, the solid tumor is any other type of solid tumor known in the art. Each possibility represents a separate embodiment of the present invention.

[0102] In another embodiment, the present invention provides a method of detecting a presence of a solid tumor in a subject, the method comprising the step of detecting a presence in a body fluid of the subject of a DR6 protein, whereby the presence in a body fluid of the protein indicates the presence of a solid tumor in the subject. In another embodiment, the solid tumor is an ovarian tumor. In another embodiment, the solid tumor is any other type of solid tumor known in the art. Each possibility represents a separate embodiment of the present invention.

[0103] In another embodiment, the present invention provides a method of detecting a presence of a solid tumor in a subject, the method comprising the step of detecting a presence in a body fluid of the subject of a DR6-encoding nucleotide molecule, whereby the presence in a body fluid of the nucleotide molecule indicates the presence of a solid tumor in the subject. In another embodiment, the solid tumor is an ovarian tumor. In another embodiment, the solid tumor is any other type of solid tumor known in the art. Each possibility represents a separate embodiment of the present invention.

[0104] In another embodiment, the present invention provides a method of detecting a presence of a solid tumor vasculature cell in a subject, the method comprising the step of detecting a presence in a body fluid of the subject of a protein selected from FLJ46072, IVNS1ABP, SPP1, TNPAIP6, DKFZp762e1312, WFDC2, KIAA1892, C6orf69, and KIBRA, whereby the presence in a body fluid of the protein indicates the presence of a solid tumor vasculature cell in the subject. In another embodiment, the solid tumor is an ovarian tumor. In another embodiment, the solid tumor is any other type of solid tumor known in the art. Each possibility represents a separate embodiment of the present invention.

[0105] In another embodiment, the present invention provides a method of detecting a presence of a solid tumor vasculature cell in a subject, the method comprising the step of detecting a presence in a body fluid of the subject of a nucleotide molecule that encodes a protein selected from FLJ46072, IVNS1ABP, SPP1, TNPAIP6, DKFZp762e1312, WFDC2, KIAA1892, C6orf69, and KIBRA, whereby the presence in a body fluid of the nucleotide molecule indicates the presence of a solid tumor vasculature cell in the subject. In another embodiment, the solid tumor is an ovarian tumor. In another embodiment, the solid tumor is any other type of solid tumor known in the art. Each possibility represents a separate embodiment of the present invention.

[0106] In another embodiment, the present invention provides a method of detecting a presence of a solid tumor vasculature cell in a subject, the method comprising the step of detecting a presence in a body fluid of the subject of a COL11A1 protein, whereby the presence in a body fluid of the protein indicates the presence of a solid tumor vasculature cell in the subject. In another embodiment, the solid tumor is a breast cancer tumor. In another embodiment, the solid tumor is any other type of solid tumor known in the art. Each possibility represents a separate embodiment of the present invention.

[0107] In another embodiment, the present invention provides a method of detecting a presence of a solid tumor vasculature in a subject, the method comprising the step of detecting a presence in a body fluid of the subject of a nucleotide molecule encoding a COL11A1 protein, whereby the presence in a body fluid of the nucleotide molecule indicates the presence of a solid tumor vasculature in the subject. In another embodiment, the solid tumor is a breast cancer tumor. In another embodiment, the solid tumor is any other type of solid tumor known in the art. Each possibility represents a separate embodiment of the present invention.

[0108] In another embodiment, the present invention provides a method of localizing an ovarian tumor vasculature in a subject, the method comprising the steps of: (a) contacting the subject with a ligand that binds a nucleic acid molecule, or that binds a protein encoded by the nucleic acid molecule, wherein the sequence of the nucleic acid molecule is set forth in SEQ ID No: 69; and (b) localizing the ligand, thereby localizing an ovarian tumor vasculature in a subject.

[0109] In another embodiment, the present invention provides a method of localizing an ovarian tumor vasculature in a subject, the method comprising the steps of: (a) contacting the subject with a ligand that binds a nucleic acid molecule, or that binds a protein encoded by the nucleic acid molecule, wherein the sequence of the nucleic acid molecule is set forth in SEQ ID No: 1; and (b) localizing the ligand, thereby localizing an ovarian tumor vasculature in a subject.

[0110] In another embodiment, the present invention provides a method of localizing an ovarian tumor vasculature in a subject, the method comprising the steps of: (a) contacting the subject with a ligand that binds a nucleic acid molecule, or that binds a protein encoded by the nucleic acid molecule, wherein the sequence of the nucleic acid molecule is set forth in SEQ ID No: 119; and (b) localizing the ligand, thereby localizing an ovarian tumor vasculature in a subject.

[0111] In another embodiment, the present invention provides a method of localizing an ovarian tumor vasculature in a subject, the method comprising the steps of: (a) contacting the subject with a ligand that binds a nucleic acid molecule, or that binds a protein encoded by the nucleic acid molecule, wherein the sequence of the nucleic acid molecule is set forth in SEQ ID No: 106; and (b) localizing the ligand, thereby localizing an ovarian tumor vasculature in a subject.

[0112] In another embodiment, the present invention provides a method of localizing an ovarian tumor vasculature in a subject, the method comprising the steps of: (a) contacting the subject with a ligand that binds a nucleic acid molecule, or that binds a protein encoded by the nucleic acid molecule, wherein the sequence of the nucleic acid molecule is set forth in SEQ ID No: 58; and (b) localizing the ligand, thereby localizing an ovarian tumor vasculature in a subject.

[0113] In another embodiment, the present invention provides a method of localizing a renal tumor vasculature in a subject, the method comprising the steps of: (a) contacting the subject with a ligand that binds a nucleic acid molecule, or that binds a protein encoded by the nucleic acid molecule, wherein the sequence of the nucleic acid molecule is set forth in SEQ ID No: 30; and (b) localizing the ligand, thereby localizing a renal tumor vasculature in a subject.

[0114] In another embodiment, the present invention provides a method of localizing an ovarian tumor vasculature in a subject, the method comprising the steps of: (a) contacting the subject with a ligand that binds a nucleic acid molecule, or that binds a protein encoded by the nucleic acid molecule, wherein the sequence of the nucleic acid molecule is set forth in SEQ ID No: 27; and (b) localizing the ligand, thereby localizing an ovarian tumor vasculature in a subject.

[0115] In another embodiment, the present invention provides a method of localizing an ovarian tumor vasculature in a subject, the method comprising the steps of: (a) contacting the subject with a ligand that binds a nucleic acid molecule, or that binds a protein encoded by the nucleic acid molecule, wherein the sequence of the nucleic acid molecule is set forth in SEQ ID No: 37; and (b) localizing the ligand, thereby localizing an ovarian tumor vasculature in a subject.

[0116] In another embodiment, the present invention provides a method of localizing a breast cancer tumor vasculature in a subject, the method comprising the steps of: (a) contacting the subject with a ligand that binds a nucleic acid molecule, or that binds a protein encoded by the nucleic acid molecule, wherein the sequence of the nucleic acid molecule is set forth in SEQ ID No: 21; and (b) localizing the ligand, thereby localizing a breast cancer tumor vasculature in a subject.

[0117] In another embodiment, the present invention provides a method of localizing an ovarian tumor vasculature in a subject, the method comprising the steps of: (a) contacting the subject with a ligand that binds a nucleic acid molecule, or that binds a protein encoded by the nucleic acid molecule, wherein the sequence of the nucleic acid molecule is set forth in SEQ ID No: 68; and (b) localizing the ligand, thereby localizing an ovarian tumor vasculature in a subject.

[0118] In another embodiment, the present invention provides a method of localizing an ovarian tumor vasculature in a subject, the method comprising the steps of: (a) contacting the subject with a ligand that binds a nucleic acid molecule, or that binds a protein encoded by the nucleic acid molecule, wherein the sequence of the nucleic acid molecule is set forth in SEQ ID No: 2; and (b) localizing the ligand, thereby localizing an ovarian tumor vasculature in a subject.

[0119] In another embodiment, the present invention provides a method of localizing an ovarian tumor vasculature in a subject, the method comprising the steps of: (a) contacting the subject with a ligand that binds a nucleic acid molecule, or that binds a protein encoded by the nucleic acid molecule, the nucleic acid molecule having a sequence selected from the sequences set forth in SEQ ID No: 13, 14, 26, 35, 39, 42, 43, 47, 104, 108, 111, 113, 116, 118, 121, 127, 130, 132, 134, 146, 152, 165, 169, 170, 179, and 181; and (b) localizing the ligand, thereby localizing an ovarian tumor vasculature in a subject.

[0120] In another embodiment, the present invention provides a method of treating an ovarian tumor in a subject, the method comprising the step of contacting the subject with an antibody or ligand that is conjugated to a cytotoxic agent or cytotoxic drug and that binds a nucleic acid molecule or a protein encoded by the nucleic acid molecule, wherein the sequence of the nucleic acid molecule is selected from the sequences set forth in SEQ ID No: 1, 2, 13, 14, 26, 27, 35, 37, 39, 42, 43, 47, 58, 68, 69, 104, 106, 108, 111, 113, 116, 118, 119, 121, 127, 130, 132, 134, 146, 152, 165, 169, 170, 179, and 181, thereby treating an ovarian tumor in a subject.

[0121] In another embodiment, the present invention provides a method of treating a renal tumor in a subject, the method comprising the step of contacting the subject with an antibody or ligand that is conjugated to a cytotoxic agent or cytotoxic drug and that binds a nucleic acid molecule or a protein encoded by the nucleic acid molecule, wherein the sequence of the nucleic acid molecule is set forth in SEQ ID No: 30, thereby treating a renal tumor in a subject.

[0122] In another embodiment, the present invention provides a method of treating a breast cancer tumor in a subject, the method comprising the step of contacting the subject with an antibody or ligand that is conjugated to a cytotoxic agent or cytotoxic drug and that binds a nucleic acid molecule or a protein encoded by the nucleic acid molecule, wherein the sequence of the nucleic acid molecule is set forth in SEQ ID No: 21, thereby treating a breast cancer tumor in a subject.

[0123] In another embodiment, the present invention provides a method of impeding a vascularization of an ovarian tumor in a subject, the method comprising the step of contacting the subject with a ligand capable of inhibiting an activity of a nucleic acid molecule or a protein encoded by the nucleic acid molecule wherein the sequence of the nucleic acid molecule is selected from the sequences set forth in SEQ ID No: 1, 2, 13, 14, 26, 27, 35, 37, 39, 42, 43, 47, 58, 68, 69, 104, 106, 108, 111, 113, 116, 118, 119, 121, 127, 130, 132, 134, 146, 152, 165, 169, 170, 179, and 181, whereby the ligand is taken up by a vasculature cell of the ovarian tumor, thereby impeding a vascularization of an ovarian tumor in a subject.

[0124] In another embodiment, the present invention provides a method of impeding a vascularization of a renal tumor in a subject, the method comprising the step of contacting the subject with a ligand capable of inhibiting an activity of a nucleic acid molecule or a protein encoded by the nucleic acid molecule wherein the sequence of the nucleic acid molecule is set forth in SEQ ID No: 30, whereby the ligand is taken up by a vasculature cell of the renal tumor, thereby impeding a vascularization of a solid tumor in a subject.

[0125] In another embodiment, the present invention provides a method of impeding a vascularization of a breast cancer tumor in a subject, the method comprising the step of contacting the subject with a ligand capable of inhibiting an activity of a nucleic acid molecule or a protein encoded by the nucleic acid molecule wherein the sequence of the nucleic acid molecule is set forth in SEQ ID No: 21, whereby the ligand is taken up by a vasculature cell of the breast cancer tumor, thereby impeding a vascularization of a solid tumor in a subject.

[0126] In another embodiment, the present invention provides a method of detecting a presence of an ovarian tumor in a subject, the method comprising the step of detecting a presence in a body fluid of the subject of a protein encoded by a nucleotide molecule, wherein the sequence of the nucleotide molecule is set forth in SEQ ID No: 2, whereby the presence in a body fluid of the protein indicates the presence of an ovarian tumor in the subject.

[0127] In another embodiment, the present invention provides a method of detecting a presence of an ovarian tumor in a subject, the method comprising the step of detecting a presence in a body fluid of the subject of a nucleotide molecule, wherein the sequence of the nucleotide molecule is set forth in SEQ ID No: 2, whereby the presence in a body fluid of the nucleotide molecule indicates the presence of an ovarian tumor in the subject.

[0128] In another embodiment, the present invention provides a method of detecting a presence of an ovarian tumor in a subject, the method comprising the step of detecting a presence in a body fluid of the subject of a protein encoded by a nucleotide molecule, wherein the sequence of the nucleotide molecule is set forth in SEQ ID No: 69, whereby the presence in a body fluid of the protein indicates the presence of an ovarian tumor in the subject.

[0129] In another embodiment, the present invention provides a method of detecting a presence of an ovarian tumor in a subject, the method comprising the step of detecting a presence in a body fluid of the subject of a nucleotide molecule, wherein the sequence of the nucleotide molecule is set forth in SEQ ID No: 69, whereby the presence in a body fluid of the nucleotide molecule indicates the presence of an ovarian tumor in the subject.

[0130] In another embodiment, the present invention provides a method of detecting a presence of an ovarian tumor vasculature cell in a subject, the method comprising the step of detecting a presence in a body fluid of the subject of a protein encoded by a nucleotide molecule selected from SEQ ID No: 14, 35, 42, 68, 121, 127, 169, 179, and 181, whereby the presence in a body fluid of the protein indicates the presence of an ovarian tumor vasculature cell in the subject.

[0131] In another embodiment, the present invention provides a method of detecting a presence of an ovarian tumor vasculature cell in a subject, the method comprising the step of detecting a presence in a body fluid of the subject of a nucleotide molecule selected from SEQ ID No: 14, 35, 42, 68, 121, 127, 169, 179, and 181, whereby the presence in a body fluid of the nucleotide molecule indicates the presence of an ovarian tumor vasculature cell in the subject.

[0132] In another embodiment, the present invention provides a method of detecting a presence of a breast cancer vasculature in a subject, the method comprising the step of detecting a presence in a body fluid of the subject of a protein encoded by a SEQ ID No: 21, whereby the presence in a body fluid of the protein indicates the presence of a breast cancer vasculature in the subject.

[0133] In another embodiment, the present invention provides a method of detecting a presence of a breast cancer vasculature cell in a subject, the method comprising the step of detecting a presence in a body fluid of the subject of a nucleotide molecule, wherein the sequence of the nucleotide molecule is set forth in SEQ ID No: 21, whereby the presence in a body fluid of the nucleotide molecule indicates the presence of a breast cancer vasculature cell in the subject.

[0134] In another embodiment, the present invention provides a method of detecting the presence of a TVC in a subject, the method comprising the steps of (a) contacting the subject with a ligand that binds to a nucleic acid molecule, the nucleic acid molecule encoding a protein selected from an Adlican protein; a collagen, type XI, alpha 1 (COL11A1) protein; a Defensin, beta 1 (DEFB1) protein; an EPB41L3 protein; a Coagulation factor II (thrombin) receptor-like 1 (F2RL1) protein; a Frizzled 10 (FZD10) protein; a Glycoprotein M6B (GPM6B) protein; a B lymphocyte activator macrophage expressed (BLAME) protein; a Spondin 1 (SPON-1) protein; a Stanniocalcin 2 (STC2) protein; a Tumor necrosis factor, alpha-induced protein 6 (TNFAIP6) protein; and a Tumor necrosis factor receptor superfamily, member 21 (TNFRSF21) protein; and (b) imaging the ligand in the subject, whereby, if the ligand is concentrated in an area of a tissue of the subject, then the subject has a TVC in the area.

[0135] “Nucleic acid molecule” and “nucleotide” refer, in another embodiment, to an RNA molecule. In another embodiment, the terms refer to a DNA molecule. In another embodiment, the terms refer to any other type of nucleic acid molecule enumerated herein. In another embodiment, the terms refer to any other type of nucleic acid molecule known in the art. Each possibility represents a separate embodiment of the present invention.

[0136] In another embodiment, the present invention provides a method of detecting the presence of a TVC in a subject, the method comprising the steps of (a) contacting the subject with a ligand that binds to a protein selected from an Adlican protein, a COL11A1 protein, a DEFB1 protein, an EPB41L3 protein, a F2RL1 protein, an FZD10 protein, a GPM6B protein, a BLAME protein, a SPON1 protein, a STC2 protein, a TNFAIP6 protein, and a TNFRSF21 protein; and (b) imaging the ligand in the subject, whereby, if the ligand is concentrated in an area of a tissue of the subject, then the subject has a TVC in the area.

[0137] In another embodiment, the present invention provides a method of detecting the presence of a TVC in a subject, the method comprising the steps of (a) contacting the subject with a ligand that binds to a nucleic acid molecule, the nucleic acid molecule encoding a protein selected from an AML-1 protein and an LZTS1 protein; and (b) imaging the ligand in the subject, whereby, if the ligand is concentrated in an area of a tissue of the subject, then the subject has a TVC in the area.

[0138] In another embodiment, the present invention provides a method of detecting the presence of a TVC in a subject, the method comprising the steps of (a) contacting the subject with a ligand that binds to a protein selected from an AML-1 protein and an LZTS1 protein; and (b) imaging the ligand in the subject, whereby, if the ligand is concentrated in an area of a tissue of the subject, then the subject has a TVC in the area.

[0139] In another embodiment, the present invention provides a method of detecting the presence of a TVC in a subject, the method comprising the steps of (a) contacting the subject with a ligand that binds to a nucleic acid molecule, the nucleic acid molecule encoding a protein selected from selected from FAD104; WARP; BCAP29; CDH1; FLJ10826; OPN3; HIATL2; IL28RA; TMEM19; C10orf69; FRAP1; CKLFSF6; MPHOSPH9; CLST11240; MS4A6A; SGPP2; SLC11A1; SLCO3A1; LOC51136; DKFZp564I1922; KCNE3; CALM3; KCNE4; MGC34647; MUC1; SDC1; SLC30A6; ST14; CDCP1; TLCD1; SPTB; FNDC3; SPRY1; MME; INSR; LPPR4; C14orf100; SLC9A5; SCGB2A1; FLT1; MOBK1B; TMEM2; TMEM8; SLC5A4; MEST; CHODL; TRIO; IL10RA; LGALS3BP; STK4; ERBB3; C14orf28; KIAA1024; KIAA1906; F3; PCDHB2; KIAA0703; C1orf10; POLYDOM; TUBAL3; GPR105; IL7R; ARHGAP18; GRM1; PREX1; MUC3A; EPSTI1; and UBE2J1; and (b) imaging the ligand in the subject, whereby, if the ligand is concentrated in an area of a tissue of the subject, then the subject has a TVC in the area.

[0140] In another embodiment, the present invention provides a method of detecting the presence of a TVC in a subject, the method comprising the steps of (a) contacting the subject with a ligand that binds to a protein selected from FAD104; WARP; BCAP29; CDH1; FLJ10826; OPN3; HIATL2; IL28RA; TMEM19; C10orf69; FRAP1; CKLFSF6; MPHOSPH9; CLST11240; MS4A6A; SGPP2; SLC11A1; SLC03A1; LOC51136; DKFZp564I1922; KCNE3; CALM3; KCNE4; MGC34647; MUC1; SDC1; SLC30A6; ST14; CDCP1; TLCD1; SPTB; FNDC3; SPRY1; MME; INSR; LPPR4; C14orf100; SLC9A5; SCGB2A1; FLT1; MOBK1B; TMEM2; TMEM8; SLC5A4; MEST; CHODL; TRIO; IL10RA; LGALS3BP; STK4; ERBB3; C14orf28; KIAA1024; KIAA1906; F3; PCDHB2; KIAA0703; C1orf10; POLYDOM; TUBAL3; GPR105; IL7R; ARHGAP18; GRM1; PREX1; MUC3A; EPSTI1; and UBE2J1; and (b) imaging the ligand in the subject, whereby, if the ligand is concentrated in an area of a tissue of the subject, then the subject has a TVC in the area.

[0141] “Imaging” refers, in another embodiment, to localizing a ligand of interest using an imaging or scanning technology. In another embodiment, the ligand is a fluorescent ligand. In another embodiment, the ligand is radioactive. In another embodiment, the ligand is bound by a molecule (e.g. an antibody) that is detectable by the imaging or scanning technology. In another embodiment, any suitable imaging or scanning technology known in the art may be utilized. Each possibility represents a separate embodiment of the present invention.

[0142] In another embodiment of methods of the present invention, the TVM is expressed at detectable levels only in the TVC, but not in the surrounding tissue. In another embodiment, the TVC is expressed at significantly higher levels in the TVC, relative to the surrounding tissue. In another embodiment, the TVM is expressed at detectable levels only in the TVC, but not in other body tissues. In another embodiment, the TVC is expressed at significantly higher levels in the TVC, relative to other body tissues. Each possibility represents a separate embodiment of the present invention.

[0143] As provided herein, a rapid protocol was developed and optimized for immuno-LCM of TVC, followed by extraction and amplification of RNA for array analysis of tumor vascular cells (Example 1). This enabled identification of the novel tumor vasculature markers (TVM) of the present invention. The identified transcripts and proteins encoded thereby were validated as TVM by a number of independent lines of evidence, including enrichment in independent tumor samples, relative to normal vascular samples; enrichment in tumor tissue relative to a variety of tissue samples; and comparison of expression levels between tumor tissue and tissues with physiologic angiogenesis (Example 3).

[0144] In another embodiment, the present invention provides a method of detecting a solid tumor in a subject, the method comprising the steps of (a) contacting the subject with a ligand that binds to a nucleic acid molecule, the nucleic acid molecule encoding a protein selected from an Adlican protein, a COL11A1 protein, a DEFB1 protein, an EPB41L3 protein, a F2RL1 protein, an FZD10 protein, a GPM6B protein, a BLAME protein, a SPON1 protein, a STC2 protein, a TNFAIP6 protein, and a TNFRSF21 protein; and (b) imaging the ligand in the subject, whereby, if the ligand is concentrated in an area of a tissue of the subject, then the subject has a solid tumor in the area.

[0145] In another embodiment, the present invention provides a method of detecting a solid tumor in a subject, the method comprising the steps of (a) contacting the subject with a ligand that binds to a protein selected from an Adlican protein, a COL11A1 protein, a DEFB1 protein, an EPB41L3 protein, a F2RL1 protein, an FZD10 protein, a GPM6B protein, a BLAME protein, a SPON1 protein, a STC2 protein, a TNFAIP6 protein, and a TNFRSF21 protein; and (b) imaging the ligand in the subject, whereby, if the ligand is concentrated in an area of a tissue of the subject, then the subject has a solid tumor in the area.

[0146] In another embodiment, the present invention provides a method of detecting a solid tumor in a subject, the method comprising the steps of (a) contacting the subject with a ligand that binds to a nucleic acid molecule, the nucleic acid molecule encoding a protein selected from an AML-1 protein and an LZTS1 protein; and (b) imaging the ligand in the subject, whereby, if the ligand is concentrated in an area of a tissue of the subject, then the subject has a solid tumor in the area.

[0147] In another embodiment, the present invention provides a method of detecting a solid tumor in a subject, the method comprising the steps of (a) contacting the subject with a ligand that binds to a protein selected from an AML-1 protein and an LZTS1 protein; and (b) imaging the ligand in the subject, whereby, if the ligand is concentrated in an area of a tissue of the subject, then the subject has a solid tumor in the area.

[0148] In another embodiment, the present invention provides a method of detecting a solid tumor in a subject, the method comprising the steps of (a) contacting the subject with a ligand that binds to a nucleic acid molecule, the nucleic acid molecule encoding a protein selected from FAD104; WARP; BCAP29; CDH1; FLJ10826; OPN3; HIATL2; IL28RA; TMEM19; C10orf69; FRAP1; CKLFSF6; MPHOSPH9; CLST11240; MS4A6A; SGPP2; SLC11A1; SLC03A1; LOC51136; DKFZp564I1922; KCNE3; CALM3; KCNE4; MGC34647; MUC1; SDC1; SLC30A6; ST14; CDCP1; TLCD1; SPTB; FNDC3; SPRY1; MME; INSR; LPPR4; C14orf100; SLC9A5; SCGB2A1; FLT1; MOBK1B; TMEM2; TMEM8; SLC5A4; MEST; CHODL; TRIO; IL10RA; LGALS3BP; STK4; ERBB3; C14orf28; KIAA1024; KIAA1906; F3; PCDHB2; KIAA0703; C1orf10; POLYDOM; TUBAL3; GPR105; IL7R; ARHGAP18; GRM1; PREX1; MUC3A; EPST11; and UBE2J1; and (b) imaging the ligand in the subject, whereby, if the ligand is concentrated in an area of a tissue of the subject, then the subject has a solid tumor in the area.

[0149] In another embodiment, the present invention provides a method of detecting a solid tumor in a subject, the method comprising the steps of (a) contacting the subject with a ligand that binds to a protein selected from FAD104; WARP; BCAP29; CDH1; FLJ10826; OPN3; HIATL2; IL28RA; TMEM19; C10orf69; FRAP1; CKLFSF6; MPHOSPH9; CLST11240; MS4A6A; SGPP2; SLC11A1; SLC03A1; LOC51136; DKFZp564I1922; KCNE3; CALM3; KCNE4; MGC34647; MUC1; SDC1; SLC30A6; ST14; CDCP1; TLCD1; SPTB; FNDC3; SPRY1; MME; INSR; LPPR4; C14orf100; SLC9A5; SCGB2A1; FLT1; MOBK1B; TMEM2; TMEM8; SLC5A4; MEST; CHODL; TRIO; IL10RA; LGALS3BP; STK4; ERB-B3; C14orf28; KIAA1024; KIAA1906; F3; PCDHB2; KIAA0703; C1orf10; POLYDOM; TUBAL3; GPR105; IL7R; ARHGAP18; GRM1; PREX1; MUC3A; EPST11; and UBE2J1; and (b) imaging the ligand in the subject, whereby, if the ligand is concentrated in an area of a tissue of the subject, then the subject has a solid tumor in the area.

[0150] In another embodiment, the present invention provides a method of localizing a tumor vasculature in a subject, the method comprising the steps of (a) contacting the tumor vasculature with a ligand that binds to a nucleic acid molecule, the nucleic acid molecule encoding a protein selected from a DEFB1 protein, an EPB41L3 protein, a F2RL1 protein, a GPM6B protein, a SPON1 protein, and a STC2 protein; and (b) localizing the ligand, thereby localizing a tumor vasculature.

[0151] As provided herein, certain TVM transcripts of the present invention and the proteins encoded thereby are efficacious in localizing solid tumors and vasculature thereof (Examples 4 and 5).

[0152] In another embodiment, the present invention provides a method of localizing a tumor vasculature in a subject, the method comprising the steps of (a) contacting the tumor vasculature with a ligand that binds to a protein selected from a DEFB1 protein, an EPB41L3 protein, a F2RL1 protein, a GPM6B protein, a SPON1 protein, and a STC2 protein; and (b) localizing the ligand, thereby localizing a tumor vasculature in a subject.

[0153] In another embodiment, the present invention provides a method of localizing a tumor vasculature in a subject, the method comprising the steps of (a) contacting the tumor vasculature with a ligand that binds to a nucleic acid molecule, the nucleic acid molecule encoding a protein selected from an AML-1 protein and an LZTS1 protein; and (b) localizing the ligand, thereby localizing a tumor vasculature in a subject.

[0154] In another embodiment, the present invention provides a method of localizing a tumor vasculature in a subject, the method comprising the steps of (a) contacting the tumor vasculature with a ligand that binds to a protein selected from an AML-1 protein and an LZTS1 protein; and (b) localizing the ligand, thereby localizing a tumor vasculature in a subject.

[0155] In another embodiment, the present invention provides a method of localizing a tumor vasculature in a subject, the method comprising the steps of (a) contacting the tumor vasculature with a ligand that binds to a nucleic acid molecule, the nucleic acid molecule encoding a protein selected from FAD104; WARP; BCAP29; CDH1; FLJ10826; OPN3; HIATL2; IL28RA; TMEM19; C10orf69; FRAP1; CKLFSF6; MPHOSPH9; CLST11240; SGPP2; SLC03A1; DKFZp564I1922; CALM3; MGC34647; MUC1; SLC30A6; TLCD1; SPTB; FNDC3; SPRY1; MME; INSR; LPPR4; C14orf100; SLC9A5; SCGB2A1; FLT1; MOBK1B; TMEM2; TMEM8; SLC5A4; MEST; CHODL; TRIO; IL10RA; LGALS3BP; STK4; ERBB3; C14orf28; KIAA1024; KIAA1906; F3; PCDHB2; KIAA0703; C1orf10; POLYDOM; TUBAL3; IL7R; ARHGAP18; GRM1; PREX1; MUC3A; and UBE2J1; and (b) localizing the ligand, thereby localizing a tumor vasculature in a subject.

[0156] In another embodiment, the present invention provides a method of localizing a tumor vasculature in a subject, the method comprising the steps of (a) contacting the tumor vasculature with a ligand that binds to a protein selected from FAD104; WARP; BCAP29; CDH1; FLJ10826; OPN3; HIATL2; IL28RA; TMEM19; C10orf69; FRAP1; CKLFSF6; MPHOSPH9; CLST11240; SGPP2; SLC03A1; DKFZp564I1922; CALM3; MGC34647; MUC1; SLC30A6; TLCD1; SPTB; FNDC3; SPRY1; MME; INSR; LPPR4; C14orf100; SLC9A5; SCGB2A1; FLT1; MOBK1B; TMEM2; TMEM8; SLC5A4; MEST; CHODL; TRIO; IL10RA; LGALS3BP; STK4; ERBB3; C14orf28; KIAA1024; KIAA1906; F3; PCDHB2; KIAA0703; C1orf10; POLYDOM; TUBAL3; IL7R; ARHGAP18; GRM1; PREX1; MUC3A; and UBE2J1; and (b) localizing the ligand, thereby localizing a tumor vasculature in a subject.

[0157] In another embodiment, the present invention provides a method of localizing a solid tumor in a subject, the method comprising the steps of (a) contacting the subject with a ligand that binds to a nucleic acid molecule, the nucleic acid molecule encoding a protein selected from an Adlican protein, a COL11A1 protein, a DEFB1 protein, an EPB41L3 protein, a F2RL1 protein, an FZD10 protein, a GPM6B protein, a BLAME protein, a SPON1 protein, a STC2 protein, a TNFAIP6 protein, and a TNFRSF21 protein; and (b) localizing the ligand, thereby localizing a solid tumor in a subject.

[0158] In another embodiment, the present invention provides a method of localizing a solid tumor in a subject, the method comprising the steps of (a) contacting the subject with a ligand that binds to a protein selected from an Adlican protein, a COL11A1 protein, a DEFB11 protein, an EPB41L3 protein, a F2RL1 protein, an FZD10 protein, a GPM6B protein, a BLAME protein, a SPON1 protein, a STC2 protein, a TNFAIP6 protein, and a TNFRSF21 protein; and (b) localizing the ligand, thereby localizing a solid tumor in a subject.

[0159] In another embodiment, the present invention provides a method of localizing a solid tumor in a subject, the method comprising the steps of (a) contacting the subject with a ligand that binds to a nucleic acid molecule, the nucleic acid molecule encoding a protein selected from an AML-1 protein and an LZTS1 protein; and (b) localizing the ligand, thereby localizing a solid tumor in a subject.

[0160] In another embodiment, the present invention provides a method of localizing a solid tumor in a subject, the method comprising the steps of (a) contacting the subject with a ligand that binds to a protein selected from an AML-1 protein and an LZTS1 protein; and (b) localizing the ligand, thereby localizing a solid tumor in a subject.

[0161] In another embodiment, the present invention provides a method of localizing a solid tumor in a subject, the method comprising the steps of (a) contacting the subject with a ligand that binds to a nucleic acid molecule, the nucleic acid molecule encoding a protein selected from FAD104; WARP; BCAP29; CDH1; FLJ10826; OPN3; HIATL2; IL28RA; TMEM19; C10orf69; FRAP1; CKLFSF6; MPHOSPH9; CLST11240; MS4A6A; SGPP2; SLC11A1; SLC03A1; LOC51136; DKFZp564I1922; KCNE3; CALM3; KCNE4; MGC34647; MUC1; SDC1; SLC30A6; ST14; CDCP1; TLCD1; SPTB; FNDC3; SPRY1; MME; INSR; LPPR4; C14orf100; SLC9A5; SCGB2A1, FLT1; MOBK1B; TMEM2; TMEM8; SLC5A4; MEST; CHODL; TRIO; IL10RA; LGALS3BP; STK4; ERBB3; C14orf28; KIAA1024; KIAA1906; F3; PCDHB2; KIAA0703; C1orf10; POLYDOM; TUBAL3; GPR105; IL7R; ARHGAP18; GRM1; PREX1; MUC3A; EPSTI1; and UBE2J1; and (b) localizing the ligand, thereby localizing a solid tumor in a subject.

[0162] In another embodiment, the present invention provides a method of localizing a solid tumor in a subject, the method comprising the steps of (a) contacting the subject with a ligand that binds to a protein selected from FAD104; WARP; BCAP29; CDH1; FLJ10826; OPN3; HIATL2; IL28RA; TMEM19; C10orf69; FRAP1; CKLFSF6; MPHOSPH9; CLST11240; MS4A6A; SGPP2; SLC11A1; SLC03A1; LOC51136; DKFZp564I1922; KCNE3; CALM3; KCNE4; MGC34647; MUC1; SDC1; SLC30A6; ST14; CDCP1; TLCD1; SPTB; FNDC3; SPRY1; MME; INSR; LPPR4; C14orf100; SLC9A5; SCGB2A1; FLT1; MOBK1B; TMEM2; TMEM8; SLC5A4; MEST; CHODL; TRIO; IL10RA; LGALS3BP; STK4; ERBB3; C14orf28; KIAA1024; KIAA1906; F3; PCDHB2; KIAA0703; C1orf10; POLYDOM; TUBAL3; GPR105; IL7R; ARHGAP18; GRM1; PREX1; MUC3A; EPSTI1; and UBE2J1; and (b) localizing the ligand, thereby localizing a solid tumor in a subject.

[0163] In another embodiment, a method of present invention of localizing or detecting a tumor, TVC, or tumor vasculature utilizes positron-emission tomography (PET) scanning. In another embodiment, the method utilizing any other imaging technique known in the art. Each possibility represents a separate embodiment of the present invention.

[0164] In another embodiment, the present invention provides a method of treating a solid tumor in a subject, the method comprising the step of contacting the subject with an antibody or ligand that is conjugated to a anti-cancer agent and that binds to a nucleic acid molecule, the nucleic acid molecule encoding a protein selected from a DEFB1 protein, an EPB41L3 protein, a F2RL1 protein, a GPM6B protein, a SPON1 protein, and a STC2 protein, thereby treating a solid tumor in a subject.

[0165] In another embodiment, the present invention provides a method of treating a solid tumor in a subject, the method comprising the step of contacting the subject with an antibody or ligand that is conjugated to a anti-cancer agent and that binds to a protein selected from a DEFB1 protein, an EPB41L3 protein, a F2RL1 protein, a GPM6B protein, a SPON1 protein, and a STC2 protein, thereby treating a solid tumor in a subject.

[0166] In another embodiment, the present invention provides a method of treating a solid tumor in a subject, the method comprising the step of contacting the subject with an antibody or ligand that is conjugated to a anti-cancer agent and that binds to a nucleic acid molecule, the nucleic acid molecule encoding a protein selected from an AML-1 protein and an LZTS1 protein, thereby treating a solid tumor in a subject.

[0167] In another embodiment, the present invention provides a method of treating a solid tumor in a subject, the method comprising the step of contacting the subject with an antibody or ligand that is conjugated to a anti-cancer agent and that binds to a protein selected from an AML-1 protein and an LZTS1 protein, thereby treating a solid tumor in a subject.

[0168] In another embodiment, the present invention provides a method of treating a solid tumor in a subject, the method comprising the step of contacting the subject with an antibody or ligand that is conjugated to a anti-cancer agent and that binds to a nucleic acid molecule, the nucleic acid molecule encoding a protein selected from FAD104; WARP; BCAP29; CDH1; FLJ10826; OPN3; HIATL2; IL28RA; TMEM19; C10orf69; FRAP1; CKLFSF6; MPHOSPH9; CLST11240; SGPP2; SLCO3A1; DKFZp564I1922; CALM3; MGC34647; MUC1; SLC30A6; TLCD1; SPTB; FNDC3; SPRY1; MME; INSR; LPPR4; C14orf100; SLC9A5; SCGB2A1; FLT1; MOBK1B; TMEM2; TMEM8; SLC5A4; MEST; CHODL; TRIO; IL10RA; LGALS3BP; STK4; ERBB3; C14orf28; KIAA1024; KIAA1906; F3; PCDHB2; KIAA0703; C1orf10; POLYDOM; TUBAL3; IL7R; ARHGAP18; GRM1; PREX1; MUC3A; and UBE2J1, thereby treating a solid tumor in a subject.

[0169] In another embodiment, the present invention provides a method of treating a solid tumor in a subject, the method comprising the step of contacting the subject with an antibody or ligand that is conjugated to a anti-cancer agent and that binds to a protein selected from FAD104; WARP; BCAP29; CDH1; FLJ10826; OPN3; HIATL2; IL28RA; TMEM19; C10orf69; FRAP1; CKLFSF6; MPHOSPH9; CLST11240; SGPP2; SLCO3A1; DKFZp564I1922; CALM3; MGC34647; MUC1; SLC30A6; TLCD1; SPTB; FNDC3; SPRY1; MME; INSR; LPPR4; C14orf10; SLC9A5; SCGB2A1; FLT1; MOBK1B; TMEM2; TMEM8; SLC5A4; MEST; CHODL; TRIO; IL10RA; LGALS3BP; STK4; ERBB3; C14orf28; KIAA1024; KIAA1906; F3; PCDHB2; KIAA0703; C1orf10; POLYDOM; TUBAL3; IL7R; ARHGAP18; GRM1; PREX1; MUC3A; and UBE2J1, thereby treating a solid tumor in a subject.

[0170] As provided in the Examples herein, certain TVM of the present invention are expressed at detectable levels only by TVC. In another embodiment, the TVM are expressed at higher levels by TVC than by healthy tissue. Thus, TVM provide a means of specifically targeting therapeutic modalities to solid tumors and their vasculature.

[0171] In another embodiment, the present invention provides a method of inducing a regression of a solid tumor in a subject, the method comprising the step of contacting the subject with an antibody or ligand that is conjugated to a anti-cancer agent and that binds to a nucleic acid molecule, the nucleic acid molecule encoding a protein selected from an Adlican protein, a COL11A1 protein, a DEFB1 protein, an EPB41L3 protein, a F2RL1 protein, an FZD10 protein, a GPM6B protein, a BLAME protein, a SPON1 protein, a STC2 protein, a TNFAIP6 protein, and a TNFRSF21 protein, thereby inducing a regression of a solid tumor in a subject.

[0172] In another embodiment, the present invention provides a method of inducing a regression of a solid tumor in a subject, the method comprising the step of contacting the subject with an antibody or ligand that is conjugated to a anti-cancer agent and that binds to a protein selected from an Adlican protein, a COL11A1 protein, a DEFB1 protein, an EPB41L3 protein, a F2RL1 protein, an FZD10 protein, a GPM6B protein, a BLAME protein, a SPON1 protein, a STC2 protein, a TNFAIP6 protein, and a TNFRSF21 protein, thereby inducing a regression of a solid tumor in a subject.

[0173] The anti-cancer agent utilized in methods and compositions of the present invention is, in another embodiment, a radioactive isotope. In another embodiment, the anti-cancer agent is a cytotoxic agent. In another embodiment, the anti-cancer agent is a cytotoxic drug. In another embodiment, the anti-cancer agent is a nucleic acid molecule. In another embodiment, the anti-cancer agent is an antisense molecule. In another embodiment, the anti-cancer agent is an RNA inhibitory molecule. In another embodiment, the anti-cancer agent is an anti-tumor agent. In another embodiment, the anti-cancer agent is a cytotoxic virus. In another embodiment, the anti-cancer agent is a cytotoxic pathogen. In another embodiment, the anti-cancer agent is a nanosphere. In another embodiment, the nanosphere is loaded with a cytotoxic compound. In another embodiment, the nanosphere is loaded with a chemotherapy drug. In another embodiment, the nanosphere is loaded with a toxin. In another embodiment, the nanosphere is loaded with an anti-cancer compound. In another embodiment, the anti-cancer agent is a nanoparticle. In another embodiment, the anti-cancer agent is an engineered T cell. In another embodiment, the anti-cancer agent is an engineered cytotoxic cell. In another embodiment, the anti-cancer agent is any other type of engineered molecule known in the art. In another embodiment, the anti-cancer agent is any other agent used in cancer therapy. In another embodiment, the anti-cancer agent is any other type of anti-cancer agent known in the art. Each possibility represents a separate embodiment of the present invention.

[0174] “Engineered T cell” refers, in another embodiment, to a T cell designed to recognize a cell containing or expressing a molecule of interest. In another embodiment, the molecule of interest is a TVM of the present invention. In another embodiment, the term refers to a T cell with redirected specificity (T-bodies) for a TVM. In another embodiment, an engineered T cell of the present invention expresses a ligand that binds to or interacts with a TVM. In another embodiment, the engineered T cell exhibits specific activity against a TVC.

[0175] In another embodiment, an engineered T cell of the present invention expresses a chimeric immunoreceptor (CIR) directed against a TVM. In another embodiment, the CIR contains a bi-partite signaling module. In another embodiment, the extracellular module of the CIR is a single chain variable fragment (scFv) antibody that binds or interacts with a TVM. In another embodiment, the intracellular module of the CIR contains a costimulatory domain. In another embodiment, the costimulatory domain is a 4-1BB domain. In another embodiment, the costimulatory domain is a TCRξ domain. In another embodiment, the CIR contains both a 4-1BB domain and a TCRξ domain.

[0176] In another embodiment, an engineered T cell of the present invention is expanded in culture. In another embodiment, an engineered T cell of the present invention is activated in culture.

[0177] Each type of engineered T cell represents a separate embodiment of the present invention.

[0178] “Cytotoxic virus” refers, in another embodiment, to a virus capable of lysing a cell. In another embodiment, the term refers to a virus capable of lysing a tumor cell. In another embodiment, the virus is a recombinant virus that has been engineered to exhibit a characteristic favorable for anti-tumor activity. In another embodiment, the virus is wild-type, other than is conjugation to an antibody or ligand of the present invention. In another embodiment, the virus is an attenuated virus. Each possibility represents a separate embodiment of the present invention.

[0179] In another embodiment, the cytotoxic agent or anti-tumor agent is concentrated in the solid tumor. In another embodiment, the cytotoxic agent or anti-tumor agent is targeted to the solid tumor. In another embodiment, concentration of the cytotoxic agent or anti-tumor agent induces cytotoxicity in a tumor cell of the solid tumor. Each possibility represents a separate embodiment of the present invention.

[0180] In another embodiment, the present invention provides a method of impeding a vascularization of a solid tumor, the method comprising the step of contacting the subject with a ligand capable of binding to or inhibiting an activity of a nucleic acid molecule, the nucleic acid molecule encoding a protein selected from a DEFB1 protein, an EPB41L3 protein, a F2RL1 protein, a GPM6B protein, a SPON1 protein, and a STC2 protein, whereby the ligand is taken up by a vasculature cell of the solid tumor, thereby impeding a vascularization of a solid tumor.

[0181] In another embodiment, the present invention provides a method of impeding a vascularization of a solid tumor, the method comprising the step of contacting the subject with an antibody or ligand that binds to or inhibits an activity of a protein selected from a DEFB1 protein, an EPB41L3 protein, a F2RL1 protein, a GPM6B protein, a SPON1 protein, and a STC2 protein, whereby the ligand inhibits an activity of a vasculature cell of the solid tumor, thereby impeding a vascularization of a solid tumor.

[0182] In another embodiment, the present invention provides a method of impeding a vascularization of a solid tumor, the method comprising the step of contacting the subject with a ligand capable of binding to or inhibiting an activity of a nucleic acid molecule, the nucleic acid molecule encoding a protein selected from an AML-1 protein and an LZTS1 protein, whereby the ligand is taken up by a vasculature cell of the solid tumor, thereby impeding a vascularization of a solid tumor.

[0183] In another embodiment, the present invention provides a method of impeding a vascularization of a solid tumor, the method comprising the step of contacting the subject with an antibody or ligand that binds to or inhibits an activity of a protein selected from an AML-1 protein and an LZTS1 protein, whereby the ligand inhibits an activity of a vasculature cell of the solid tumor, thereby impeding a vascularization of a solid tumor.

[0184] In another embodiment, the present invention provides a method of impeding a vascularization of a solid tumor, the method comprising the step of contacting the subject with a ligand capable of binding to or inhibiting an activity of a nucleic acid molecule, the nucleic acid molecule encoding a protein selected from FAD104; WARP; BCAP29; CDH1; FLJ10826; OPN3; HIATL2; IL28RA; TMEM19; C10orf69; FRAP1; CKLFSF6; MPHOSPH9; CLST11240; SGPP2; SLCO3A1; DKFZp564I1922; CALM3; MGC34647; MUC1; SLC30A6; TLCD1; SPTB; FNDC3; SPRY1; MME; INSR; LPPR4; C14orf100; SLC9A5; SCGB2A1; FLT1; MOBK1B; TMEM2; TMEM8; SLC5A4; MEST; CHODL; TRIO; IL10RA; LGALS3BP; STK4; ERBB3; C14orf28; KIAA1024; KIAA1906; F3; PCDHB2; KIAA0703; C1orf10; POLYDOM; TUBAL3; IL7R; ARHGAP18; GRM1; PREX1; MUC3A; and UBE2J1, whereby the ligand is taken up by a vasculature cell of the solid tumor, thereby impeding a vascularization of a solid tumor.

[0185] In another embodiment, the present invention provides a method of impeding a vascularization of a solid tumor, the method comprising the step of contacting the subject with an antibody or ligand that binds to or inhibits an activity of a protein selected from FAD104; WARP; BCAP29; CDH1; FLJ10826; OPN3; HIATL2; IL28RA; TMEM19; C10orf69; FRAP1; CKLFSF6; MPHOSPH9; CLST11240; SGPP2; SLC03A1; DKFZp564I1922; CALM3; MGC34647; MUC1; SLC30A6; TLCD1; SPTB; FNDC3; SPRY1; MME; INSR; LPPR4; C14orf100; SLC9A5; SCGB2A1; FLT1; MOBK1B; TMEM2; TMEM8; SLC5A4; MEST; CHODL; TRIO; IL10RA; LGALS3BP; STK4; ERBB3; C14orf28; KIAA1024; KIAA1906; F3; PCDHB2; KIAA0703; C1orf10; POLYDOM; TUBAL3; IL7R; ARHGAP18; GRM1; PREX1; MUC3A; and UBE2J1, whereby the ligand inhibits an activity of a vasculature cell of the solid tumor, thereby impeding a vascularization of a solid tumor.

[0186] In another embodiment, the present invention provides a method of impeding an angiogenesis in a subject, the method comprising the step of contacting the subject with a ligand capable of binding to a nucleic acid molecule, wherein the nucleic acid molecule is a TVM of the present invention, whereby the ligand is taken up by a vasculature cell of the solid tumor or a precursor of the vasculature cell, thereby impeding an angiogenesis in a subject.

[0187] In another embodiment, the present invention provides a method of impeding an angiogenesis in a subject, the method comprising the step of contacting the subject with an antibody or ligand that binds to a protein that is a TVM of the present invention, whereby the ligand inhibits an activity of a vasculature cell of the solid tumor or a precursor of the vasculature cell, thereby impeding an angiogenesis in a subject.

[0188] “Vasculature cell” refers, in another embodiment, to a cell capable of forming a tumor vasculature. In another embodiment, the term refers to a cell of a tumor vasculature. In another embodiment, “precursor of the vasculature cell” refers to a cell capable of differentiating into a cell capable of forming a tumor vasculature. In another embodiment, the term refers to a cell capable of differentiating into a cell of a tumor vasculature. Each possibility represents a separate embodiment of the present invention.

[0189] “Activity” refers, in another embodiment, to an angiogenic activity. In another embodiment, the term refers to production of a protein of the present invention. In another embodiment, the term refers to any other tumorigenic activity known in the art. Each possibility represents a separate embodiment of the present invention.

[0190] In another embodiment, the ligand reduces the expression of the nucleic acid to which it binds, or the expression of the protein encoded by the nucleic acid. In another embodiment, the ligand reduces the activity of the protein to which it binds. In another embodiment, binding to the ligand results in degradation of the nucleic acid molecule or protein to which it binds. In another embodiment, the ligand antagonizes the nucleic acid molecule or protein to which it binds via any other mechanism known in the art. Each possibility represents a separate embodiment of the present invention.

[0191] As provided herein, certain TVM of the present invention are up-regulated upon differentiation of precursor cells into TVC. Thus, these TVM (both the nucleic acid molecules and the proteins encoded thereby) play important roles in the function of TVC in angiogenesis, and thus in the pathogenesis of solid tumors. Accordingly, targeting the expression or activity of the nucleic acids and proteins represents an efficacious means of impeding vascularization of solid tumors.

[0192] The ligand utilized in methods and compositions of the present invention is, in another embodiment, an antisense molecule. In another embodiment, the ligand is an RNA molecule. In another embodiment, the ligand is an inhibitory RNA (RNAi) molecule. In another embodiment, the RNA molecule is a short hairpin RNA (shRNA). In another embodiment, the RNA molecule is a small inhibitory RNA (siRNA). In another embodiment, the RNA molecule is a microRNA (miRNA). The use of siRNA and miRNA has been described, inter alia, in (Caudy A A et al, Genes & Devel 16:2491-96 and references cited therein). In another embodiment, the RNA molecule is an anti-sense locked-nucleic acid (LNA) oligonucleotide. In another embodiment, the RNA molecule is any type of inhibitory RNA enumerated or described in Banan M et al (The ins and outs of RNAi in mammalian cells. Curr Pharm Biotechnol. 2004 October; 5(5):441-50. In another embodiment, the RNA molecule is any type of RNAi known in the art.

[0193] In another embodiment, an RNA molecule utilized in methods of the present invention comprises a string of at least two base-sugar-phosphate combinations. The term includes, in another embodiment, compounds comprising nucleotides in which the sugar moiety is ribose. In another embodiment, the term includes both RNA and RNA derivates in which the backbone is modified.

[0194] “Nucleotides” refers, in one embodiment, to the monomeric units of nucleic acid polymers. RNA may be, in another embodiment, in the form of a tRNA (transfer RNA), snRNA (small nuclear RNA), rRNA (ribosomal RNA), mRNA (messenger RNA), and ribozymes. In addition, these forms of RNA may be single, double, triple, or quadruple stranded. The term also includes, in another embodiment, artificial nucleic acids that may contain other types of backbones but the same bases. In one embodiment, the artificial nucleic acid is a PNA (peptide nucleic acid). PNA contain peptide backbones and nucleotide bases and are able to bind, in one embodiment, to both DNA and RNA molecules. In another embodiment, the nucleotide is oxetane modified. In another embodiment, the nucleotide is modified by replacement of one or more phosphodiester bonds with a phosphorothioate bond. In another embodiment, the artificial nucleic acid contains any other variant of the phosphate backbone of native nucleic acids known in the art. The use of phosphothiorate nucleic acids and PNA are known to those skilled in the art, and are described in, for example, Neilsen P E (Curr Opin Struct Biol 9:353-57); and Raz N K et al (Biochem Biophys Res Commun. 297:1075-84). The production and use of nucleic acids is known to those skilled in art and is described, for example, in Molecular Cloning, (2001), Sambrook and Russell, eds. and Methods in Enzymology: Methods for molecular cloning in eukaryotic cells (2003) Purchio and G. C. Fareed. Each nucleic acid derivative represents a separate embodiment of the present invention.

[0195] In another embodiment, the ligand induces degradation of the target nucleic acid molecule. In another embodiment, the ligand inhibits transcription of the nucleic acid molecule. In another embodiment, the ligand kills the TVC. In another embodiment, the ligand induces apoptosis of the TVC. In another embodiment, the ligand induces necrosis of the TVC. In another embodiment, the ligand inhibits proliferation of the TVC. In another embodiment, the ligand inhibits division of the TVC. In another embodiment, the ligand inhibits growth of the solid tumor. In another embodiment, the ligand induces regression of the solid tumor. Each possibility represents a separate embodiment of the present invention.

[0196] The activity of a vasculature cell that is inhibited by methods of the present invention, is, another embodiment, a catalytic activity. In another embodiment, the activity is interaction with another cell. In another embodiment, the activity is cell-cell adhesion. In another embodiment, the activity is contact repulsion. In another embodiment, the activity is DNA binding. In another embodiment, the activity is transcriptional regulation. In another embodiment, the activity is cartilage condensation. In another embodiment, the activity is protein binding. In another embodiment, the activity is extracellular structure organization and/or biogenesis. In another embodiment, the activity is phosphate transport. In another embodiment, the activity is G-protein coupled receptor protein signaling. In another embodiment, the activity is intracellular calcium signaling. In another embodiment, the activity is rhodopsin-like receptor activity. In another embodiment, the activity is thrombin receptor activity. In another embodiment, the activity is cell cycle modulation. In another embodiment, the activity is cell cycle inhibition. In another embodiment, the activity is cell surface receptor-linked signal transduction. In another embodiment, the activity is inflammatory signaling. In another embodiment, the activity is anti-inflammatory signaling. In another embodiment, the activity is hyaluronic acid binding. In another embodiment, the activity is any other activity performed by a protein encoded by a nucleic acid molecule having a sequence selected from the sequences set forth in SEQ ID No: 2, 5, 21, 25, 29, 36-38, 44, 58, 60, 62, and 68-69. Each possibility represents a separate embodiment of the present invention.

[0197] In another embodiment, the present invention provides a method of determining a stage of a solid tumor in a subject, the method comprising the steps of (a) contacting the subject with a ligand capable of binding to a nucleic acid molecule, the nucleic acid molecule encoding a protein selected from an Adlican protein, a COL11A1 protein, a DEFB1 protein, an EPB41L3 protein, a F2RL1 protein, an FZD10 protein, a GPM6B protein, a BLAME protein, a SPON1 protein, a STC2 protein, a TNFAIP6 protein, and a TNFRSF21 protein; (b) imaging the ligand in the subject, whereby if the ligand is concentrated in the solid tumor, then the solid tumor has a tumor vasculature.

[0198] As provided herein, TVM of the present invention are upregulated upon differentiation to TVC, both in vitro and in vivo (Examples 6-7), showing that expression levels of these proteins, and nucleotides encoding same can be used to determine the sate of a solid tumor.

[0199] In another embodiment, the present invention provides a method of determining a stage of a solid tumor, the method comprising the steps of (a) contacting the solid tumor with a ligand capable of binding to a protein selected from an Adlican protein, a COL11A1 protein, a DEFB1 protein, an EPB41L3 protein, a F2L1 protein, an FZD10 protein, a GPM6B protein, a BLAME protein, a SPON1 protein, a STC2 protein, a TNFAIP6 protein, and a TNFRSF21 protein; (b) imaging the ligand in the subject, whereby if the ligand is concentrated in the solid tumor, then the solid tumor has a tumor vasculature.

[0200] In another embodiment, the present invention provides a method of determining a stage of a solid tumor, the method comprising the steps of (a) contacting the solid tumor with a ligand capable of binding to a nucleic acid molecule, the nucleic acid molecule encoding a protein selected from an AML-1 protein and an LZTS1 protein; (b) imaging the ligand in the subject. In another embodiment if the ligand is concentrated in the solid tumor, then the solid tumor has a tumor vasculature. In another embodiment, the solid tumor is forming a tumor vasculature. In another embodiment, the solid tumor is committed to forming a tumor vasculature. Each possibility represents a separate embodiment of the present invention.

[0201] In another embodiment, the present invention provides a method of determining a stage of a solid tumor, the method comprising the steps of (a) contacting the solid tumor with a ligand capable of binding to a protein selected from an AML-1 protein and an LZTS1 protein; (b) imaging the ligand in the subject. In another embodiment if the ligand is concentrated in the solid tumor, then the solid tumor has a tumor vasculature. In another embodiment, the solid tumor is forming a tumor vasculature. In another embodiment, the solid tumor is committed to forming a tumor vasculature. Each possibility represents a separate embodiment of the present invention.

[0202] In another embodiment, the present invention provides a method of determining a stage of a solid tumor, the method comprising the steps of (a) contacting the solid tumor with a ligand capable of binding to a nucleic acid molecule, the nucleic acid molecule encoding a protein selected from FAD104; WARP; BCAP29; CDH1; FLJ10826; OPN3; HIATL2; IL28RA; TMEM19; C10orf69; FRAP1; CKLFSF6; MPHOSPH9; CLST11240; MS4A6A; SGPP2; SLC11A1; SLCO3A1; LOC51136; DKFZp564I1922; KCNE3; CALM3; KCNE4; MGC34647; MUC1; SDC1; SLC30A6; ST14; CDCP1; TLCD1; SPTB; FNDC3; SPRY1; MME; INSR; LPPR4; C14orf100; SLC9A5; SCGB2A1; FLT1; MOBK1B; TMEM2; TMEM8; SLC5A4; MEST; CHODL; TRIO; IL10RA; LGALS3BP; STK4; ERBB3; C14orf28; KIAA1024; KIAA1906; F3; PCDHB2; KIAA0703; C1orf10; POLYDOM; TUBAL3; GPR105; IL7R; ARHGAP18; GRM1; PREX1; MUC3A; EPSTI1; and UBE2J1; (b) imaging the ligand in the subject, whereby if the ligand is concentrated in the solid tumor, then the solid tumor has a tumor vasculature.

[0203] In another embodiment, the present invention provides a method of determining a stage of a solid tumor, the method comprising the steps of (a) contacting the solid tumor with a ligand capable of binding to a protein selected from FAD104; WARP; BCAP29; CDH1; FLJ10826; OPN3; HIATL2; IL28RA; TMEM19; C10orf69; FRAP1; CKLFSF6; MPHOSPH9; CLST11240; MS4A6A; SGPP2; SLC11A1; SLCO3A1; LOC51136; DKFZp564I1922; KCNE3; CALM3; KCNE4; MGC34647; MUC1; SDC1; SLC30A6; ST14; CDCP1; TLCD1; SPTB; FNDC3; SPRY1; MME; INSR; LPPR4; C14orf100; SLC9A5; SCGB2A 1; FLT1; MOBK1B; TMEM2; TMEM8; SLC5A4; MEST; CHODL; TRIO; IL10RA; LGALS3BP; STK4; ERBB3; C14orf28; KIAA1024; KIAA1906; F3; PCDHB2; KIAA0703; C1orf10; POLYDOM; TUBAL3; GPR105; IL7R; ARHGAP18; GRM1; PREX1; MUC3A; EPST11; and UBE2J1; (b) imaging the ligand in the subject, whereby if the ligand is concentrated in the solid tumor, then the solid tumor has a tumor vasculature.

[0204] In another embodiment, the present invention provides a method of localizing or detecting a presence of a TEC (Tumor Endothelial Cell) in a subject, the method comprising the steps of (a) contacting the subject with a ligand that binds to a nucleic acid molecule, the nucleic acid molecule encoding a protein selected from an Adlican protein; an EGF-like-domain, multiple 6 (EGFL6) protein; a Frizzled 10 (FZD10) protein; a Glycoprotein M6B (GPM6B) protein; and a Spondin 1 (SPON-1) protein; and (b) imaging the ligand in the subject, whereby, if the ligand is concentrated in an area of a tissue of the subject, then the subject has a TEC in the area.

[0205] In another embodiment, the present invention provides a method of detecting a presence of a solid tumor in a subject, the method comprising the step of detecting a presence in a body fluid of the subject of a protein selected from TNFAIP6; STC2; ESM1; IBSP; CKLFSF6; HAPLN1; WFDC2; SPP1; FLT1; LGALS3BP; CCL15; PLA2G2D; MUC3A; and LTBP2 (Latent transforming growth factor beta binding protein 2), wherein the presence in a body fluid of the subject of the protein indicates the presence of a solid tumor in the subject.

[0206] In another embodiment, the present invention provides a method of detecting a presence of a tumor vasculature cell in a subject, the method comprising the step of detecting a presence in a body fluid of the subject of a protein selected from TNFAIP6; STC2; ESM1; IBSP; CKLFSF6; HAPLN1; WFDC2; SPP1; FLT1; LGALS3BP; CCL15; PLA2G2D; MUC3A; and LTBP2, wherein the presence in a body fluid of the subject of the protein indicates the presence of a tumor vasculature cell in the subject.

[0207] In another embodiment, the present invention provides a method of detecting a presence of a solid tumor in a subject, the method comprising the step of detecting a presence in a body fluid of the subject of a nucleotide molecule encoding a protein selected from TNFAIP6 (Tumor necrosis factor, alpha-induced protein 6); STC2 (Stanniocalcin); ESM1 (Endothelial cell-specific molecule 1); IBSP (Integrin-binding sialoprotein); CKLFSF6 (CKLF-like MARVEL transmembrane domain containing 6); HAPLN1 (Hyaluronan and proteoglycan link protein 1); WFDC2 (WAP four-disulfide core domain 2); SPP1 (Secreted phosphoprotein 1 (osteopontin, bone sialoprotein I, early T-lymphocyte activation 1); FLT1 (Fms-related tyrosine kinase 1 (vascular endothelial growth factor/vascular permeability factor receptor); LGALS3BP (Lectin, galactoside-binding, soluble, 3 binding protein); CCL15 (chemokine (C-C motif) ligand 15); PLA2G2D (Phospholipase A2, group IID); MUC3A (Mucin 3A, intestinal); and LTBP2 (Latent transforming growth factor beta binding protein 2); wherein the presence in a body fluid of the subject of the nucleotide molecule indicates the presence of a solid tumor in the subject.

[0208] In another embodiment, the present invention provides a method of detecting a presence of a TVC in a subject, the method comprising the step of detecting a presence in a body fluid of the subject of a nucleotide molecule encoding a protein selected from TNFAIP6; STC2; ESM1; IBSP; CKLFSF6; HAPLN1; WFDC2; SPP1; FLT1; LGALS3BP; CCL15; PLA2G2D; MUC3A; and LTBP2; wherein the presence in a body fluid of the subject of the nucleotide molecule indicates the presence of a TVC in the subject.

[0209] In another embodiment, the present invention provides a method of detecting a presence of a solid tumor in a subject, the method comprising the step of detecting a presence in a body fluid of the subject of an Adlican protein, wherein the presence in a body fluid of the subject of the Adlican protein indicates the presence of a solid tumor in the subject.

[0210] In another embodiment, the present invention provides a method of detecting a presence of a tumor vasculature cell in a subject, the method comprising the step of detecting a presence in a body fluid of the subject of an Adlican protein, wherein the presence in a body fluid of the subject of the Adlican protein indicates the presence of a tumor vasculature cell in the subject.

[0211] In another embodiment, the present invention provides a method of detecting a presence of a solid tumor in a subject, the method comprising the step of detecting a presence in a body fluid of the subject of a nucleotide molecule encoding an Adlican protein, wherein the presence in a body fluid of the subject of the nucleotide molecule indicates the presence of a solid tumor in the subject.

[0212] In another embodiment, the present invention provides a method of detecting a presence of a tumor vasculature cell in a subject, the method comprising the step of detecting a presence in a body fluid of the subject of a nucleotide molecule encoding an Adlican protein, wherein the presence in a body fluid of the subject of the nucleotide molecule indicates the presence of a tumor vasculature cell in the subject.

[0213] In another embodiment, the present invention provides a peptide having the amino acid sequence CPGAKALSRVREDIVEDE (SEQ ID No: 88). In another embodiment, the sequence of the peptide consists of SEQ ID No: 88. Each possibility represents a separate embodiment of the present invention.

[0214] In another embodiment, the present invention provides an antibody that recognizes a peptide of the present invention. In another embodiment, the present invention provides an antibody that binds to a peptide of the present invention. In another embodiment, the present invention provides an antibody raised against a peptide of the present invention. Each possibility represents a separate embodiment of the present invention.

[0215] In another embodiment, the present invention provides the use of the peptide of the present invention in the detection of a solid tumor or tumor vasculature.

[0216] In another embodiment, the present invention provides the use of the peptide of the present invention in the localization of a solid tumor or tumor vasculature.

[0217] In another embodiment, the present invention provides the use of the peptide of the present invention in the treatment of a solid tumor or tumor vasculature.

[0218] As provided herein (Example 10), Adlican was detected in serum and ascites of patients with stage III ovarian cancer, but not control subjects. Thus, TVM of the present invention are efficacious for detection of tumors, by detecting their presence in bodily fluids of a subject. In another embodiment, a secreted TVM of the present invention is used. In another embodiment, a TVM of the present invention localized to the ECM is used. Each possibility represents a separate embodiment of the present invention.

[0219] “Presence in a body fluid” refers, in another embodiment, to a detectable presence. In another embodiment, the term refers to an amount that can be detected by a method used to for detection of proteins or antigens in body fluids. In another embodiment, the term refers to an amount that generates a signal over the background in a method used to for detection of proteins or antigens in body fluids.

[0220] In another embodiment, the method is ELISA. In another embodiment, the method is Western blot. In another embodiment, the method is any other method known in the art. Each possibility represents a separate embodiment of the present invention.

[0221] In another embodiment, the present invention provides a method of localizing or detecting a presence of a TEC (Tumor Endothelial Cell) in a subject, the method comprising the steps of (a) contacting the subject with a ligand that binds to a protein encoded by a nucleic acid molecule, the nucleic acid molecule encoding a protein selected from an Adlican protein; an EGFL6 protein, an FZD10 protein, a GPM6B protein, and a SPON-1 protein; and (b) imaging the ligand in the subject, whereby, if the ligand is concentrated in an area of a tissue of the subject, then the subject has a TEC in the area.

[0222] In another embodiment, the present invention provides a method of localizing or detecting a presence of a VLC (Vascular Leukocyte) in a subject, the method comprising the steps of (a) contacting the subject with a ligand that binds to a nucleic acid molecule that encodes a B lymphocyte activator macrophage expressed (BLAME) protein; and (b) imaging the ligand in the subject, whereby, if the ligand is concentrated in an area of a tissue of the subject, then the subject has a VLC in the area.

[0223] In another embodiment, the present invention provides a method of early diagnosis of a tumor, comprising a method of the present invention. In another embodiment, the present invention provides a method of early diagnosis of a cancer, comprising a method of the present invention. In another embodiment, the present invention provides a method of early diagnosis of a tumor, comprising contacting subject with a ligand that binds a TVM of the present invention. In another embodiment, the present invention provides a method of early diagnosis of a cancer, comprising contacting subject with a ligand that binds a TVM of the present invention. In another embodiment, the present invention provides a method of diagnosing or detecting a circulating TVC, comprising a method of the present invention. In another embodiment, the present invention provides a method of diagnosing or detecting a circulating TVC, comprising contacting subject with a ligand that binds a TVM of the present invention. Each possibility represents a separate embodiment of the present invention.

[0224] In another embodiment, one of the above methods utilizes a BLAME protein. As provided herein, BLAME is a marker for VLC of solid tumors and is an efficacious marker for localizing, detecting, and treating TVC and solid tumors.

[0225] In another embodiment, the present invention provides a method of inhibiting general angiogenesis, analogous to one of the above methods, comprising contacting a subject with a ligand that binds to EGFL6. In another embodiment, the present invention provides a method of detecting general angiogenesis, analogous to one of the above methods, comprising contacting a subject with a ligand that binds to EGFL6. In another embodiment, the present invention provides a method of inhibiting general angiogenesis, analogous to one of the above methods, comprising contacting a subject with a ligand that binds to OLFML2B. In another embodiment, the present invention provides a method of detecting general angiogenesis, analogous to one of the above methods, comprising contacting a subject with a ligand that binds to OLFML2B. As provided herein, EGFL6 and OLFML2B are markers of general angiogenesis.

[0226] In another embodiment, the present invention provides a method of localizing or detecting a presence of a VLC (Vascular Leukocyte) in a subject, the method comprising the steps of (a) contacting the subject with a ligand that binds to a BLAME protein; and (b) imaging the ligand in the subject, whereby, if the ligand is concentrated in an area of a tissue of the subject, then the subject has a VLC in the area.

[0227] The TVM, nucleic acid molecule, or protein encoded thereby that is detected, bound, inhibited, or targeted by a method of the present invention is, in another embodiment, in the target cell (e.g. the vasculature cell, solid tumor cell, or the like). In another embodiment, the nucleic acid molecule or protein is associated with the target cell. In another embodiment, the nucleic acid molecule or protein is expressed by the target cell. Each possibility represents a separate embodiment of the present invention.

[0228] In another embodiment, the present invention provides a method of treating a solid tumor in a subject, the method comprising the steps of localizing the solid tumor by a method of the present invention, and irradiating the solid tumor, thereby treating a solid tumor in a subject.

[0229] In another embodiment, the present invention provides a method of treating a solid tumor in a subject, the method comprising the steps of: (a) contacting the subject with a photo-activatable cytotoxic drug or pharmaceutical composition; (b) localizing the solid tumor by a method of the present invention; and (c) contacting the solid tumor with a concentrated light source, thereby treating a solid tumor in a subject.

[0230] In another embodiment, the present invention provides a method of treating an ovarian tumor in a subject, the method comprising the steps of localizing the ovarian tumor by a method of the present invention, and irradiating the ovarian tumor, thereby treating an ovarian tumor in a subject.

[0231] In another embodiment, the present invention provides a method of treating an ovarian tumor in a subject, the method comprising the steps of: (a) contacting the subject with a photo-activatable cytotoxic drug or pharmaceutical composition; (b) localizing the ovarian tumor by a method of the present invention; and (c) contacting the ovarian tumor with a concentrated light source, thereby treating an ovarian tumor in a subject.

[0232] In another embodiment, the present invention provides a method of treating a breast tumor in a subject, the method comprising the steps of localizing the breast tumor by a method of the present invention, and irradiating the breast tumor, thereby treating a breast tumor in a subject.

[0233] In another embodiment, the present invention provides a method of treating a breast tumor in a subject, the method comprising the steps of: (a) contacting the subject with a photo-activatable cytotoxic drug or pharmaceutical composition; (b) localizing the breast tumor by a method of the present invention; and (c) contacting the breast tumor with a concentrated light source, thereby treating a breast tumor in a subject.

[0234] In another embodiment, the present invention provides a method of treating a renal tumor in a subject, the method comprising the steps of localizing the renal tumor by a method of the present invention, and irradiating the renal tumor, thereby treating a renal tumor in a subject.

[0235] In another embodiment, the present invention provides a method of treating a renal tumor in a subject, the method comprising the steps of: (a) contacting the subject with a photo-activatable cytotoxic drug or pharmaceutical composition; (b) localizing the renal tumor by a method of the present invention; and (c) contacting the renal tumor with a concentrated light source, thereby treating a renal tumor in a subject.

[0236] Methods for isolation of VLC are well known in the art, and are described, for example, in Conejo-Garcia, J. R., Buckanovich, R. J., Benencia, F., Courreges, M. C., Rubin, S. C., Carroll, R. G. & Coukos, G. (2005) Blood 105: 679-81. In another embodiment, “VLC” refers to VE-cadherin⁺ CD146⁺ CD45⁺ cells. In another embodiment, the term refers to human myeloid vascular cells with endothelial-like behavior.

[0237] In another embodiment, a VLC of the present invention is a precursor of a TEC of the present invention. In another embodiment, a VLC of the present invention is a separate lineage from of a TEC of the present invention. In another embodiment, VLC of the present invention cooperate with TEC of the present invention in neo-vessel formation. Each possibility represents a separate embodiment of the present invention.

[0238] In another embodiment, a TVM of the present invention is expressed by pericytes, in addition to TVC. In another embodiment, the TVM is expressed by a subset of pericytes. In another embodiment, the TVM is not expressed on pericytes.

[0239] A TVC of the present invention is, in another embodiment, an endothelial cell. In another embodiment, the TVC is a perivascular cell. In another embodiment, the TVC derives from a myeloid DC. In another embodiment, the TVC derives from a myeloid monocytic precursor. Each possibility represents a separate embodiment of the present invention.

[0240] In another embodiment, the present invention provides a method for isolation of a TVC, as exemplified in the Examples herein. Each method exemplified or described herein represents a separate embodiment of the present invention.

[0241] In another embodiment, a TVM of the present invention is particularly efficacious for treating, localizing, or diagnosing a particular tumor type. In another embodiment, a TVM of the present invention is efficacious for treating, localizing, or diagnosing multiple tumor types. In another embodiment, collagen 11α1 is particularly useful for breast tumors. In another embodiment, collagen 11α1 is particularly useful for lung tumors. In another embodiment, LZTS1 is particularly useful for melanoma. In another embodiment, LZTS1 is particularly useful for ovarian cancer. In another embodiment, FZD10 is particularly useful for ovarian tumors. In another embodiment, EMBPL1 is particularly useful for ovarian tumors. In another embodiment, BLAME is particularly useful for a tumor selected from ovarian, adrenal, and testis tumors. In another embodiment, ESM1 is particularly useful for a tumor selected from ovarian, adrenal, and renal tumors. In another embodiment, DSG2 is particularly useful for a tumor selected from colon and recto-sigmoid. In another embodiment, EPSTI1 is particularly useful for a tumor selected from adrenal and testes. In another embodiment, MS4A6A is particularly useful for a tumor selected from adrenal and testes. In another embodiment, LOC51136 is particularly useful for a tumor selected from adrenal, breast, and liver. In another embodiment, EGFL6 is particularly useful for a tumor selected from uterine corpus, lung and omentum. In another embodiment, KCNE3 is particularly useful for a tumor selected from recto-sigmoid, stomach, kidney, and adrenal. In another embodiment, KCNE4 is particularly useful for a tumor selected from breast, pancreas, and adrenal. In another embodiment, c14orf100 is particularly useful for adrenal tumors. In another embodiment, KCNK5 is particularly useful for a tumor selected from In another embodiment, BLAME is particularly useful for a tumor selected from recto-sigmoid and adrenal. In another embodiment, FZD10 is particularly useful for a corpus uteri malignancy. In another embodiment, ST14 is particularly useful for a tumor selected from colon, liver, recto-sigmoid, and adrenal. In another embodiment, PCDHB2 is particularly useful for a tumor selected from adrenal, brain, renal, lung, pancreas, and stomach. In another embodiment, OLFML2B is particularly useful for a tumor selected from adrenal and corpus uteri. In another embodiment, GPR105 is particularly useful for a tumor selected from stomach and testes. In another embodiment, IVNS1ABP is particularly useful for a tumor selected from adrenal, kidney, and testes. In another embodiment, SPP1 is particularly useful for a tumor selected from adrenal, kidney, and liver. In another embodiment, KIAA1892 is particularly useful for a testicular tumor. In another embodiment, C6orf69 is particularly useful for an adrenal malignancy. In another embodiment, KIBRA is particularly useful for a tumor selected from kidney and prostate. Each possibility represents a separate embodiment of the present invention.

[0242] In another embodiment, a TVM of the present invention has a sequence selected from the sequences set forth in SEQ ID No: 1-16, 18-23, 25-26, 28-32, 34-46, 48-58, 60-66, 68-70, and 85-211). In another embodiment, the TVM has an AA sequence encoded by a nucleotide sequence set forth in Table 6, or in a GenBank entry whose Accession Number appears therein. In another embodiment, the TVM has an AA sequence comprising a nucleotide sequence set forth in Table 6, or in a GenBank entry whose Accession Number appears therein. Each possibility represents a separate embodiment of the present invention.

[0243] The nucleic acid molecule that is targeted by methods of the present invention, has, in another embodiment, a sequence selected from the sequences set forth in SEQ ID No: 2, 21, 25, 29, 36-38, 58, 60, 62, and 68-69. In another embodiment, the nucleic acid molecule has a sequence selected from the sequences set forth in SEQ ID No: 2, 27, 37, 38, and 60. In another embodiment, the nucleic acid molecule has the sequence set forth in SEQ ID No: 58. Each possibility represents a separate embodiment of the present invention.

[0244] In another embodiment, the TVM has a sequence set forth in Table 6. In another embodiment, the TVM has a sequence comprising a sequence set forth in Table 6. In another embodiment, the TVM has a sequence comprising a partial gene sequence set forth in Table 6. In another embodiment, the TVM has a sequence comprising a partial transcript sequence set forth in Table 6. In another embodiment, the TVM has a sequence set forth in a GenBank entry whose Accession Number appears in Table 6. In another embodiment, the TVM has a sequence comprising a sequence set forth a GenBank entry whose Accession Number appears in Table 6. In another embodiment, the TVM has a sequence comprising a partial gene sequence set forth in a GenBank entry whose Accession Number appears in Table 6. In another embodiment, the TVM has a sequence comprising a partial transcript sequence set forth in a GenBank entry whose Accession Number appears in Table 6.

[0245] In another embodiment, the TVM has a sequence set forth in Table 7. In another embodiment, the TVM has a sequence comprising a sequence set forth in Table 7. In another embodiment, the TVM has a sequence comprising a partial gene sequence set forth in Table 7. In another embodiment, the TVM has a sequence comprising a partial transcript sequence set forth in Table 7. In another embodiment, the TVM has a sequence set forth in a GenBank entry whose Accession Number appears in Table 7. In another embodiment, the TVM has a sequence comprising a sequence set forth a GenBank entry whose Accession Number appears in Table 7. In another embodiment, the TVM has a sequence comprising a partial gene sequence set forth in a GenBank entry whose Accession Number appears in Table 7. In another embodiment, the TVM has a sequence comprising a partial transcript sequence set forth in a GenBank entry whose Accession Number appears in Table 7.

[0246] In another embodiment, a nucleic acid molecule of the present invention encodes a TVM. In another embodiment, the nucleic acid molecule is a TVM. Each possibility represents a separate embodiment of the present invention.

[0247] The protein that is targeted by methods of the present invention, is, in another embodiment, encoded by a nucleic acid molecule having a sequence selected from the sequences set forth in SEQ ID No: 2, 5, 21, 25, 29, 36-38, 44, 58, 60, 62, and 68-69. In another embodiment, the protein is encoded by a nucleic acid molecule having a sequence selected from the sequences set forth in SEQ ID No: 2, 27, 37, 38, and 60. In another embodiment, the protein is encoded by a nucleic acid molecule having the sequence set forth in SEQ ID No: 58. In another embodiment, the protein is a tumor vasculature marker. In another embodiment, the protein has one of the sequences set forth below. Each possibility represents a separate embodiment of the present invention.

[0248] In another embodiment, the tumor vasculature marker (TVM) is an Adlican protein. In another embodiment, the marker is a nucleic acid molecule encoding an Adlican protein. In another embodiment, the Adlican protein is encoded by a nucleic acid molecule having the sequence set forth in SEQ ID No: 2. In another embodiment, the Adlican protein is encoded by a nucleic acid molecule having a sequence set forth in GenBank Accession No. AF245505. In another embodiment, the Adlican protein has an amino acid (AA) sequence set forth in GenBank Accession No. AF245505. In another embodiment, the Adlican protein is an MXRA5 protein. In another embodiment, the Adlican protein is encoded by any other Adlican gene sequence known in the art. In another embodiment, the Adlican protein is any other Adlican protein known in the art. In another embodiment, the TVM is an isoform of an Adlican protein. In another embodiment, the TVM is a homologue of an Adlican protein. In another embodiment, the TVM is a variant of an Adlican protein. In another embodiment, the TVM is a fragment of an Adlican protein. In another embodiment, the TVM is a fragment of an isoform, homologue, or variant of an Adlican protein. Each possibility represents a separate embodiment of the present invention.

[0249] In another embodiment, the TVM is an AML1 protein. In another embodiment, the marker is a nucleic acid molecule encoding an AML1 protein. In another embodiment, the AML1 protein is encoded by a nucleic acid molecule having the sequence set forth in SEQ ID No: 5. In another embodiment, the AML1 protein is encoded by a nucleic acid molecule having a sequence set forth in GenBank Accession No. NM_{—}001001890. In another embodiment, the AML1 protein is encoded by a nucleic acid molecule having a sequence selected from those set forth in GenBank Accession No. NM_{—}001754 and NM_{—}001987. In another embodiment, the AML1 protein has an AA sequence set forth in one of the above GenBank entries. In another embodiment, the AML1 protein is encoded by a nucleic acid molecule comprising a sequence set forth in DQ224380, DQ224379, DQ224378, DQ207762, DQ207763, DQ207764, DQ207765, DQ207766, DQ207767, DQ207768, DQ207769, DQ207770, DQ100455, DQ100456, DQ100457, AJ888032, AJ888033, AJ888034, AJ888035, AJ888036, AJ888037, AJ888038, AJ888039, AJ888040, or AJ888041. In another embodiment, the AML1 protein has an AA sequence comprising an AA sequence set forth in one of the above GenBank entries. In another embodiment, the AML1 protein is encoded by any other AML1 gene sequence known in the art. In another embodiment, the AML1 protein is any other AML1 protein known in the art. In another embodiment, the TVM is an isoform of an AML1 protein. In another embodiment, the TVM is a homologue of an AML1 protein. In another embodiment, the TVM is a variant of an AML1 protein. In another embodiment, a TEL/AML1 protein is utilized in methods and compositions of the present invention. In another embodiment, the TEL/AML1 protein is encoded by any TEL/AML1 gene sequence known in the art. In another embodiment, the TEL/AML1 protein is any TEL/AML1 protein known in the art. In another embodiment, the TVM is an isoform of a TEL/AML1 protein. In another embodiment, the TVM is a homologue of a TEL/AML1 protein. In another embodiment, an ETV6/RUNX1 protein is utilized in methods and compositions of the present invention. In another embodiment, the ETV6/RUNX1 protein is encoded by any ETV6/RUNX1 gene sequence known in the art. In another embodiment, the ETV6/RUNX1 protein is any ETV6/RUNX1 protein known in the art. In another embodiment, the TVM is an isoform of an ETV6/RUNX1 protein. In another embodiment, the TVM is a homologue of an ETV6/RUNX1 protein. In another embodiment, the TVM is a fragment of an AML1, TEL/AML1, or ETV6/RUNX1 protein. In another embodiment, the TVM is a fragment of an isoform, homologue, or variant of an AML1, TEL/AML1, or ETV6/RUNX1 protein. Each possibility represents another embodiment of the present invention.

[0250] In another embodiment, the TVM is a COL11A1 protein. In another embodiment, the marker is a nucleic acid molecule encoding a COL11A1 protein. In another embodiment, the COL11A1 protein is encoded by a nucleic acid molecule having the sequence set forth in SEQ ID No: 21. In another embodiment, the COL11A1 protein is encoded by a nucleic acid molecule with the following sequence:

(SEQ ID No: 21)

acacagtactctcagcttgttggtggaagcccctcatctgccttcattctgaaggcagggcccggcagaggaaggatcagagggtcgcg
gccggagggtcccggccggtggggccaactcagagggagaggaaagggctagagacacgaagaacgcaaaccatcaaatttagaagaaaaa
gccctttgactttttccccctctccctccccaatggctgtgtagcaaacatccctggcgataccttggaaaggacgaagttggtctgcagtcgcaatttc
gtgggttgagttcacagttgtgagtgcggggctcggagatggagccgtggtcctctaggtggaaaacgaaacggtggctctgggatttcaccgtaa
caaccctcgcattgaccttcctcttccaagctagagaggtcagaggagctgctccagttgatgtactaaaagcactagattttcacaattctccagagg
gaatatcaaaaacaacgggattttgcacaaacagaaagaattctaaaggctcagatactgcttacagagtttcaaagcaagcacaactcagtgcccc
aacaaaacagttatttccaggtggaactttcccagaagacttttcaatactatttacagtaaaaccaaaaaaaggaattcagtctttccttttatctatatat
aatgagcatggtattcagcaaattggtgttgaggttgggagatcacctgtttttctgtttgaagaccacactggaaaacctgccccagaagactatcccct
cttcagaactgttaacatcgctgacgggaagtggcatcgggtagcaatcagcgtggagaagaaaactgtgacaatgattgttgattgtaagaagaaa
accacgaaaccacttgatagaagtgagagagcaattgttgataccaatggaatcacggtttttggaacaaggattttggatgaagaagtttttgagggg
gacattcagcagtttttgatcacaggtgatcccaaggcagcatatgactactgtgagcattatagtccagactgtgactcttcagcacccaaggctgct
caagctcaggaacctcagatagatgagtatgcaccagaggatataatcgaatatgactatgagtatggggaagcagagtataaagaggctgaaagt
gtaacagagggacccactgtaactgaggagacaatagcacagacggaggcaaacatcgttgatgattttcaagaatacaactatggaacaatggaa
agttaccagacagaagctcctaggcatgtttctgggacaaatgagccaaatccagttgaagaaatatttactgaagaatatctaacgggagaggattat
gattcccagaggaaaaattctgaggatacactatatgaaaacaaagaaatagacggcagggattctgatcttctggtagatggagatttaggcgaata
tgatttttatgaatataaagaatatgaagataaaccaacaagcccccctaatgaagaatttggtccaggtgtaccagcagaaactgatattacagaaac
aagcataaatggccatggtgcatatggagagaaaggacagaaaggagaaccagcagtggttgagcctggtatgcttgtcgaaggaccaccagga
ccagcaggacctgcaggtattatgggtcctccaggtctacaaggccccactggaccccctggtgaccctggcgataggggccccccaggacgtcc
tggcttaccaggggctgatggtctacctggtcctcctggtactatgttgatgttaccgttccgttatggtggtgatggttccaaaggaccaaccatctctg
ctcaggaagctcaggctcaagctattcttcagcaggctcggattgctctgagaggcccacctggcccaatgggtctaactggaagaccaggtcctgt
gggggggcctggttcatctggggccaaaggtgagagtggtgatccaggtcctcagggccctcgaggcgtccagggtccccctggtccaacggga
aaacctggaaaaaggggtcgtccaggtgcagatggaggaagaggaatgccaggagaacctggggcaaagggagatcgagggtttgatggactt
ccgggtctgccaggtgacaaaggtcacaggggtgaacgaggtcctcaaggtcctccaggtcctcctggtgatgatggaatgaggggagaagatg
gagaaattggaccaagaggtcttccaggtgaagctggcccacgaggtttgctgggtccaaggggaactccaggagctccagggcagcctggtatg
gcaggtgtagatggccccccaggaccaaaagggaacatgggtccccaaggggagcctgggcctccaggtcaacaagggaatccaggacctca
gggtcttcctggtccacaaggtccaattggtcctcctggtgaaaaaggaccacaaggaaaaccaggacttgctggacttcctggtgctgatgggcct
cctggtcatcctgggaaagaaggccagtctggagaaaagggggctctgggtccccctggtccacaaggtcctattggatacccgggcccccggg
gagtaaagggagcagatggtgtcagaggtctcaagggatctaaaggtgaaaagggtgaagatggttttccaggattcaaaggtgacatgggtctaa
aaggtgacagaggagaagttggtcaaattggcccaagaggggaagatggccctgaaggacccaaaggtcgagcaggcccaactggagaccca
ggtccttcaggtcaagcaggagaaaagggaaaacttggagttccaggattaccaggatatccaggaagacaaggtccaaagggttccactggattc
cctgggtttccaggtgccaatggagagaaaggtgcacggggagtagctggcaaaccaggccctcggggtcagcgtggtccaacgggtcctcgag
gttcaagaggtgcaagaggtcccactgggaaacctgggccaaagggcacttcaggtggcgatggccctcctggccctccaggtgaaagaggtcc
tcaaggacctcagggtccagttggattccctggaccaaaaggccctcctggaccacctgggaaggatgggctgccaggacaccctgggcaacgt
ggggagactggatttcaaggcaagaccggccctcctgggccagggggagtggttggaccacagggaccaaccggtgagactggtccaataggg
gaacgtgggcatcctggccctcctggccctcctggtgagcaaggtcttcctggtgctgcaggaaaagaaggtgcaaagggtgatccaggtcctcaa
ggtatctcagggaaagatggaccagcaggattacgtggtttcccaggggaaagaggtcttcctggagctcagggtgcacctggactgaaaggagg
ggaaggtccccagggcccaccaggtccagttggctcaccaggagaacgtgggtcagcaggtacagctggcccaattggtttaccagggcgcccg
ggacctcagggtcctcctggtccagctggagagaaaggtgctcctggagaaaaaggtccccaagggcctgcagggagagatggagttcaaggtc
ctgttggtctcccagggccagctggtcctgccggctcccctggggaagacggagacaagggtgaaattggtgagccgggacaaaaaggcagca
agggtgacaagggagaaaatggccctcccggtcccccaggtcttcaaggaccagttggtgcccctggaattgctggaggtgatggtgaaccaggt
cctagaggacagcaggggatgtttgggcaaaaaggtgatgagggtgccagaggcttccctggacctcctggtccaataggtcttcagggtctgcca
ggcccacctggtgaaaaaggtgaaaatggggatgttggtcccatggggccacctggtcctccaggcccaagaggccctcaaggtcccaatggag
ctgatggaccacaaggacccccagggtctgttggttcagttggtggtgttggagaaaagggtgaacctggagaagcagggaacccagggcctcct
ggggaagcaggtgtaggcggtcccaaaggagaaagaggagagaaaggggaagctggtccacctggagctgctggacctccaggtgccaagg
ggccaccaggtgatgatggccctaagggtaacccgggtcctgttggttttcctggagatcctggtcctcctggggaacctggccctgcaggtcaaga
tggtgttggtggtgacaagggtgaagatggagatcctggtcaaccgggtcctcctggcccatctggtgaggctggcccaccaggtcctcctggaaa
acgaggtcctcctggagctgcaggtgcagagggaagacaaggtgaaaaaggtgctaagggggaagcaggtgcagaaggtcctcctggaaaaac
cggcccagtcggtcctcagggacctgcaggaaagcctggtccagaaggtcttcggggcatccctggtcctgtgggagaacaaggtctccctggag
ctgcaggccaagatggaccacctggtcctatgggacctcctggcttacctggtctcaaaggtgaccctggctccaagggtgaaaagggacatcctg
gtttaattggcctgattggtcctccaggagaacaaggggaaaaaggtgaccgagggctccctggaactcaaggatctccaggagcaaaaggggat
gggggaattcctggtcctgctggtcccttaggtccacctggtcctccaggtttaccaggtcctcaaggcccaaagggtaacaaaggctctactggac
ccgctggccagaaaggtgacagtggtcttccagggcctcctgggtctccaggtccacctggtgaagtcattcagcctttaccaatcttgtcctccaaa
aaaacgagaagacatactgaaggcatgcaagcagatgcagatgataatattcttgattactcggatggaatggaagaaatatttggttccctcaattcc
ctgaaacaagacattgagcatatgaaatttccaatgggtactcagaccaatccagcccgaacttgtaaagacctgcaactcagccatcctgacttccc
agatggtgaatattggattgatcctaaccaaggttgctcaggagattccttcaaagtttactgtaatttcacatctggtggtgagacttgcatttatccaga
caaaaaatctgagggagtaagaatttcatcatggccaaaggagaaaccaggaagttggtttagtgaatttaagaggggaaaactgctttcatacttag
atgttgaaggaaattccatcaatatggtgcaaatgacattcctgaaacttctgactgcctctgctcggcaaaatttcacctaccactgtcatcagtcagca
gcctggtatgatgtgtcatcaggaagttatgacaaagcacttcgcttcctgggatcaaatgatgaggagatgtcctatgacaataatccttttatcaaaac
actgtatgatggttgtgcgtccagaaaaggctatgaaaagactgtcattgaaatcaatacaccaaaaattgatcaagtacctattgttgatgtcatgatca
atgactttggtgatcagaatcagaagttcggatttgaagttggtcctgtttgttttcttggctaagattaagacaaagaacatatcaaatcaacagaaaata
taccttggtgccaccaacccattttgtgccacatgcaagttttgaataaggatggtatagaaaacaacgctgcatatacaggtaccatttaggaaatacc
gatgcctttgtgggggcagaatcacatggcaaaagctttgaaaatcataaagatataagttggtgtggctaagatggaaacagggctgattcttgattc
ccaattctcaactctccttttcctatttgaatttctttggtgctgtagaaaacaaaaaaagaaaaatatatattcataaaaaatatggtgctcattctcatcc
atccaggatgtactaaaacagtgtgtttaataaattgtaattattttgtgtacagttctatactgttatctgtgtccatttccaaaacttgcacgtgtccctg
aattccatctgactctaattttatgagaattgcagaactctgatggcaataaatatatgtattatgaaaaaataaagttgtaatttctgatgactctaagtcc
ctttctttggttaataataaaatgcctttgtatatattgatgttgaagagttcaattatttgatgtcgccaacaaaattctcagagggcaaaaatctggaaga
cttttggaagcacactctgatcaactcttctctgccgacagtcattttgctgaatttcagccaaaaatattatgcattttgatgctttattcaaggctatacc
tcaaactttttcttctcagaatccaggatttcacaggatacttgtatatatggaaaacaagcaagtttatatttttggacagggaaatgtgtgtaagaaagta
tattaacaaatcaatgcctccgtcaagcaaacaatcatatgtatactttttttctacgttatctcatctccttgttttcagtgtgcttcaataatgcaggtta
atattaaagatggaaattaagcaattatttatgaatttgtgcaatgttagattttcttatcaatcaagttcttgaatttgattctaagttgcatattataaca
gtctcgaaaattattttacttgcccaacaaatattacttttttcctttcaagataattttataaatcatttgacctacctaattgctaaatgaataacatatg
gtggactgttattaagagtatttgttttaagtcattcaggaaaatctaaacttttttttccactaaggtatttactttaaggtagcttgaaatagcaatacaa
tttaaaaattaaaaactgaattttgtatctattttaagtaatatatgtaagacttgaaaataaatgttttatttcttatataaagtgttaaattaattgatac
cagatttcactggaacagtttcaactgataatttatgacaaaagaacatacctgtaatattgaaattaaaaagtgaaatttgtcataaagaatttcttttatt
tttgaaatcgagtttgtaaagtgccttttaagaagggagatatgaatccaataaataaactcaagtcttggctacctgga.

[0251] In another embodiment, the COL11A1 protein is encoded by a nucleic acid molecule having a sequence set forth in GenBank Accession No. NM_{—}001854. In another embodiment, the COL11A1 protein is encoded by a nucleic acid molecule having a sequence selected from those set forth in GenBank Accession No. NM_{—}080629, NM_{—}080630, J04177, AB208844, and AB208844. In another embodiment, the COL11A1 protein has an AA sequence set forth in one of the above GenBank entries. In another embodiment, the COL11A1 protein has an AA sequence set forth in GenBank Accession No. NP_{—}542196, NP_{—}542197, AAA51891, or BAD92081. In another embodiment, the COL11A1 protein is encoded by a COL11A transcript variant A. In another embodiment, the COL11A1 protein is encoded by a COL11A transcript variant B. In another embodiment, the COL11A1 protein is encoded by a COL11A transcript variant C. In another embodiment, the COL11A1 protein is a COL11A isoform A. In another embodiment, the COL11A1 protein is a COL11A isoform B. In another embodiment, the COL11A1 protein is a COL11A isoform C. In another embodiment, the COL11A1 protein is encoded by any other COL11A1 gene sequence known in the art. In another embodiment, the COL11A1 protein is any other COL11A1 protein known in the art. In another embodiment, the TVM is an isoform of a COL11A1 protein. In another embodiment, the TVM is a homologue of a COL11A1 protein. In another embodiment, the TVM is a variant of a COL11A1 protein. In another embodiment, the TVM is a fragment of a COL11A1 protein. In another embodiment, the TVM is a fragment of an isoform, homologue, or variant of a COL11A1 protein. Each possibility represents another embodiment of the present invention.

[0252] In another embodiment, the TVM is a DEFB1 protein. In another embodiment, the marker is a nucleic acid molecule encoding a DEFB1 protein. In another embodiment, the DEFB1 protein is encoded by a nucleic acid molecule having the sequence set forth in SEQ ID No: 25. In another embodiment, the DEFB1 protein is encoded by a nucleic acid molecule having a sequence set forth in GenBank Accession No. BC033298. In another embodiment, the DEFB1 protein is encoded by a nucleic acid molecule having a sequence selected from those set forth in GenBank Accession No. BC047677, NM_{—}005218, U73945, Z50788, and X92744. In another embodiment, the DEFB1 protein has an AA sequence set forth in one of the above GenBank entries. In another embodiment, the DEFB1 protein has an AA sequence selected from the sequences set forth in GenBank Accession No. NP_{—}005209, AAH33298, AAH47677, CAA63405, and CAA90650. In another embodiment, the DEFB1 protein is encoded by any other DEFB1 gene sequence known in the art. In another embodiment, the DEFB1 protein is any other DEFB1 protein known in the art. In another embodiment, the TVM is an isoform of a DEFB1 protein. In another embodiment, the TVM is a homologue of a DEFB1 protein. In another embodiment, the TVM is a variant of a DEFB1 protein. In another embodiment, the TVM is a fragment of a DEFB1 protein. In another embodiment, the TVM is a fragment of an isoform, homologue, or variant of a DEFB1 protein. Each possibility represents another embodiment of the present invention.

[0253] In another embodiment, the TVM is an EPB41L3 protein. In another embodiment, the marker is a nucleic acid molecule encoding an EPB41L3 protein. In another embodiment, the TVM is a homologue of an EPB41L3 precursor protein. In another embodiment, the TVM is a variant of an EPB41L3 precursor protein. In another embodiment, the TVM is an isoform of an EPB41L3 precursor protein. In another embodiment, the TVM is a fragment of an EPB41L3 protein. In another embodiment, the TVM is a fragment of an isoform, homologue, or variant of an EPB41L3 protein. Each possibility represents another embodiment of the present invention.

[0254] In another embodiment, the TVM is an F2RL1 protein. In another embodiment, the marker is a nucleic acid molecule encoding an F2RL1 protein. In another embodiment, the F2RL1 protein is encoded by a nucleic acid molecule having the sequence set forth in SEQ ID No: 36. In another embodiment, the F2RL1 protein is encoded by a nucleic acid molecule having a sequence set forth in GenBank Accession No. BC012453. In another embodiment, the F2RL1 protein is encoded by a nucleic acid molecule having a sequence selected from those set forth in GenBank Accession No. BC018130, U34038, BC012453, BC018130, BT009856, AY336105, and NM_{—}005242. In another embodiment, the F2 μl protein has an AA sequence set forth in one of the above GenBank entries. In another embodiment, the F2RL1 protein has an AA sequence selected from the sequences set forth in GenBank Accession No. NP_{—}005233, AAB47871, AAH12453, AAH18130, AAP88858, and AAP97012. In another embodiment, the F2RL1 protein is encoded by any other F2L1 gene sequence known in the art. In another embodiment, the F2RL1 protein is any other F2RL1 protein known in the art. In another embodiment, the TVM is an isoform of an F2RL1 protein. In another embodiment, the TVM is a homologue of an F2RL1 protein. In another embodiment, the TVM is a variant of an F2RL1 protein. In another embodiment, a coagulation factor II (thrombin) receptor-like 1 (F2RL1) precursor protein is utilized in methods and compositions of the present invention. In another embodiment, the F2RL1 precursor protein is encoded by a gene having a sequence set forth in GenBank Accession No. NP_{—}005233. In another embodiment, the F2RL1 precursor protein is encoded by any F2RL1 precursor gene sequence known in the art. In another embodiment, the F2RL1 precursor protein is any F2RL1 precursor protein known in the art. In another embodiment, the TVM is an isoform of a F2RL1 precursor protein. In another embodiment, the TVM is a fragment of an F2RL1 protein or precursor thereof. In another embodiment, the TVM is a fragment of an isoform, homologue, or variant of an F2L1 protein or precursor thereof. Each possibility represents another embodiment of the present invention.

[0255] In another embodiment, the TVM is a GPM6B protein. In another embodiment, the marker is a nucleic acid molecule encoding a GPM6B protein. In another embodiment, the GPM6B protein is encoded by a nucleic acid molecule having the sequence set forth in SEQ ID No: 38. In another embodiment, the GPM6B protein is encoded by a nucleic acid molecule having a sequence set forth in GenBank Accession No. BC008151. In another embodiment, the GPM6B protein is encoded by a nucleic acid molecule having a sequence selected from those set forth in GenBank Accession No. BC047295, NM_{—}005278, NM_{—}001001994, NM_{—}001001995, NM_{—}001001996, AK095657, AB209525, and U45955. In another embodiment, the GPM6B protein has an AA sequence set forth in one of the above GenBank entries. In another embodiment, the GPM6B protein has an AA sequence selected from the sequences set forth in GenBank Accession No. NP_{—}005269, AAH08151, BAC04600, BAD92762, and AAB16888. In another embodiment, the GPM6B protein is encoded by a transcript variant 1 of a GPM6B-encoding RNA. In another embodiment, the GPM6B protein is encoded by a transcript variant 2 of a GPM6B-encoding RNA. In another embodiment, the GPM6B protein is encoded by a transcript variant 3 of a GPM6B-encoding RNA. In another embodiment, the GPM6B protein is encoded by a transcript variant 4 of a GPM6B-encoding RNA. In another embodiment, the GPM6B protein is encoded by any other GPM6B gene sequence known in the art. In another embodiment, the GPM6B protein is a GPM6B isoform 1. In another embodiment, the GPM6B protein is a GPM6B isoform 2. In another embodiment, the GPM6B protein is an M6b-2. In another embodiment, the GPM6B protein is a GPM6B isoform 3. In another embodiment, the TVM is another isoform of a GPM6B protein. In another embodiment, the GPM6B protein is any other GPM6B protein known in the art. In another embodiment, the TVM is a homologue of a GPM6B protein. In another embodiment, the TVM is a variant of a GPM6B protein. In another embodiment, the TVM is a fragment of a GPM6B protein. In another embodiment, the TVM is a fragment of an isoform, homologue, or variant of a GPM6B protein. Each possibility represents another embodiment of the present invention.

[0256] In another embodiment, the TVM is an LZTS1 protein. In another embodiment, the marker is a nucleic acid molecule encoding a LZTS1 protein. In another embodiment, the LZTS1 protein is encoded by a nucleic acid molecule having the sequence set forth in SEQ ID No: 44. In another embodiment, the LZTS1 protein is encoded by a nucleic acid molecule having a sequence set forth in GenBank Accession No. NM_{—}021020. In another embodiment, the LZTS1 protein is encoded by a nucleic acid molecule having a sequence selected from those set forth in GenBank Accession No. AF123659, BC075006, AF123654, AF123655, AF123656, AF123657, AF123658, BC075006, BC075007, and BC075007. In another embodiment, the LZTS1 protein has an AA sequence set forth in one of the above GenBank entries. In another embodiment, the LZTS1 protein has an AA sequence selected from the sequences set forth in NP_{—}066300, AAD23833, AAD23835, AAD23836, AAD23837, AAD23838, AAD23839, AAD23840, AAH75006 and AAH75007. In another embodiment, the LZTS1 protein is encoded by any other LZTS1 gene sequence known in the art. In another embodiment, the LZTS1 protein is any other LZTS1 protein known in the art. In another embodiment, the TVM is an isoform of a LZTS1 protein. In another embodiment, the TVM is a homologue of a LZTS1 protein. In another embodiment, the TVM is a variant of a LZTS1 protein. In another embodiment, an E16T8 FEZ1 or a fasciculation and elongation protein zeta 1 (FEZ1) protein is utilized in methods and compositions of the present invention. In another embodiment, the FEZ1 protein is encoded by any FEZ1 gene sequence known in the art. In another embodiment, the FEZ1 protein is any FEZ1 protein known in the art. In another embodiment, the TVM is an isoform of a FEZ1 protein. In another embodiment, the TVM is a homologue of a FEZ1 protein. In another embodiment, a zygin I protein is utilized in methods and compositions of the present invention. In another embodiment, the zygin I protein is encoded by any zygin I gene sequence known in the art. In another embodiment, the zygin I protein is any zygin I protein known in the art. In another embodiment, the TVM is an isoform of a zygin I protein. In another embodiment, the TVM is a homologue of a zygin I protein. In another embodiment, a LAPSER1 protein is utilized in methods and compositions of the present invention. In another embodiment, the LAPSER1 protein is encoded by any LAPSER1 gene sequence known in the art. In another embodiment, the LAPSER1 protein is any LAPSER1 protein known in the art. In another embodiment, the TVM is an isoform of a LAPSER1 protein. In another embodiment, the TVM is a homologue of a LAPSER1 protein. In another embodiment, the TVM is a fragment of a LZTS1, FEZ1, zygin I, or LAPSER1 protein. In another embodiment, the TVM is a fragment of an isoform, homologue, or variant of a LZTS1, FEZ1, zygin I, or LAPSER1 protein. Each possibility represents another embodiment of the present invention.

[0257] In another embodiment, the TVM is a BLAME protein. In another embodiment, the marker is a nucleic acid molecule encoding a BLAME protein. In another embodiment, the BLAME protein is encoded by a nucleic acid molecule having the sequence set forth in SEQ ID No: 58. In another embodiment, the BLAME protein is encoded by a nucleic acid molecule having a sequence set forth in GenBank Accession No. AK074669. In another embodiment, the BLAME protein is encoded by a nucleic acid molecule having a sequence selected from those set forth in GenBank Accession No. BC109194, NM_{—}020125, AF144235, or AF146761. In another embodiment, the BLAME protein is encoded by a FLJ90188 cDNA. In another embodiment, the BLAME protein has an AA sequence set forth in one of the above GenBank entries. In another embodiment, the BLAME protein has an AA sequence selected from the sequences set forth in GenBank Accession No. NP_{—}064510, AAD33923, AAF67470, AA109195, and BAC11123. In another embodiment, the BLAME protein is referred to as “SLAMF8.” In another embodiment, the BLAME protein is encoded by any other BLAME gene sequence known in the art. In another embodiment, the BLAME protein is any other BLAME protein known in the art. In another embodiment, the TVM is an isoform of a BLAME protein. In another embodiment, the TVM is a homologue of a BLAME protein. In another embodiment, the TVM is a variant of a BLAME protein. In another embodiment, a BCM-like membrane protein precursor or IgSF protein is utilized in methods and compositions of the present invention. In another embodiment, the protein is encoded by any BCM-like membrane protein precursor or IgSF protein gene sequence known in the art. In another embodiment, the protein is any BCM-like membrane protein precursor or IgSF protein known in the art. In another embodiment, the TVM is an isoform of a BCM-like membrane protein precursor or IgSF protein. In another embodiment, the TVM is a homologue of a BCM-like membrane protein precursor or IgSF protein. In another embodiment, an FLJ20442 protein is utilized in methods and compositions of the present invention. In another embodiment, the FLJ20442 protein is encoded by any FLJ20442 gene sequence known in the art. In another embodiment, the FLJ20442 protein is any FLJ20442 protein known in the art. In another embodiment, the TVM is an isoform of an FLJ20442 protein. In another embodiment, the TVM is a homologue of an FLJ20442 protein. In another embodiment, the TVM is a fragment of a BLAME, IgSF, or FLJ20442 protein. In another embodiment, the TVM is a fragment of an isoform, homologue, or variant of a BLAME, IgSF, or FLJ20442 protein. Each possibility represents another embodiment of the present invention.

[0258] In another embodiment, the TVM is a SPON1 protein. In another embodiment, the marker is a nucleic acid molecule encoding a SPON1 protein. In another embodiment, the SPON1 protein is encoded by a nucleic acid molecule having the sequence set forth in SEQ ID No: 60. In another embodiment, the SPON1 protein is encoded by a nucleic acid molecule having a sequence set forth in GenBank Accession No. NM_{—}006108. In another embodiment, the SPON1 protein is encoded by a nucleic acid molecule having a sequence selected from those set forth in GenBank Accession No. NM_{—}006108, AB051390, AK074803, AK074803, NP_{—}006099, and BC041974. In another embodiment, the SPON1 protein is encoded by a FLJ90322 cDNA. In another embodiment, the SPON1 protein has an AA sequence set forth in one of the above GenBank entries. In another embodiment, the SPON1 protein has an AA sequence selected from the sequences set forth in GenBank Accession No. BAA34482, BAB18461, BAC11217, AAH19825, and AAH41974. In another embodiment, the SPON1 protein is encoded by a nucleic acid molecule comprising a sequence set forth in BC019825, BC041974, and AB018305. In another embodiment, the SPON1 protein has an AA sequence comprising an AA sequence set forth in one of the above GenBank entries. In another embodiment, the SPON1 protein is encoded by any other SPON1 gene sequence known in the art. In another embodiment, the SPON1 protein is any other SPON1 protein known in the art. In another embodiment, the TVM is an isoform of a SPON1 protein. In another embodiment, the TVM is a homologue of a SPON1 protein. In another embodiment, the TVM is a variant of a SPON1 protein. In another embodiment, a VSGP/F-spondin protein is utilized in methods and compositions of the present invention. In another embodiment, the protein is encoded by any VSGP/F-spondin gene sequence known in the art. In another embodiment, the protein is any VSGP/F-spondin protein known in the art. In another embodiment, the TVM is an isoform of a VSGP/F-spondin protein. In another embodiment, the TVM is a homologue of a VSGP/F-spondin protein. In another embodiment, a KIAA0762 protein is utilized in methods and compositions of the present invention. In another embodiment, the protein is encoded by any KIAA0762 gene sequence known in the art. In another embodiment, the protein is any KIAA0762 protein known in the art. In another embodiment, the TVM is an isoform of a KIAA0762 protein. In another embodiment, the TVM is a homologue of a KIAA0762 protein. In another embodiment, the TVM is a fragment of a SPON1, VSGP/F-spondin, or KIAA0762 protein. In another embodiment, the TVM is a fragment of an isoform, homologue, or variant of a SPON1, VSGP/F-spondin, or KIAA0762 protein. Each possibility represents another embodiment of the present invention.

[0259] In another embodiment, the TVM is an STC2 protein. In another embodiment, the marker is a nucleic acid molecule encoding an STC2 protein. In another embodiment, the STC2 protein is encoded by a nucleic acid molecule having the sequence set forth in SEQ ID No: 62. In another embodiment, the STC2 protein is encoded by a nucleic acid molecule having a sequence set forth in GenBank Accession No. BC000658. In another embodiment, the STC2 protein is encoded by a nucleic acid molecule having a sequence selected from those set forth in GenBank Accession No. BC006352, BC013958, AF055460, AB012664, AK027390, AK075406, AF098462, AF031036, BT019591, CR541825, NP_{—}003705, and AK095891. In another embodiment, the STC2 protein is encoded by a cDNA selected from FLJ14484 fis, PSEC0097 fis, and FLJ38572 fis. In another embodiment, the STC2 protein has an AA sequence set forth in one of the above GenBank entries. In another embodiment, the STC2 protein has an AA sequence set forth in GenBank Accession No. AAC27036, AAC97948, AAD01922, AAH00658, AAH06352, AAH13958, AAV38398, BAA33489, and CAG46624. In another embodiment, the STC2 protein is encoded by any other STC2 gene sequence known in the art. In another embodiment, the STC2 protein is any other STC2 protein known in the art. In another embodiment, the TVM is an isoform of an STC2 protein. In another embodiment, the TVM is a homologue of an STC2 protein. In another embodiment, a STC2 precursor protein is utilized in methods and compositions of the present invention. In another embodiment, the protein is encoded by any STC2 precursor gene sequence known in the art. In another embodiment, the protein is any STC2 precursor protein known in the art. In another embodiment, the TVM is an isoform of an STC2 precursor protein. In another embodiment, the TVM is a homologue of an STC2 precursor protein. In another embodiment, the TVM is a variant of an STC2 protein. In another embodiment, the TVM is a fragment of a STC2 protein or precursor thereof. In another embodiment, the TVM is a fragment of an isoform, homologue, or variant of a STC2 protein or precursor thereof. Each possibility represents another embodiment of the present invention.

[0260] In another embodiment, the TVM is a TNFAIP6 protein. In another embodiment, the marker is a nucleic acid molecule encoding a TNFAIP6 protein. In another embodiment, the TNFAIP6 protein is encoded by a nucleic acid molecule having the sequence set forth in SEQ ID No: 68. In another embodiment, the TNFAIP6 protein is encoded by a nucleic acid molecule having a sequence set forth in GenBank Accession No. BC030205. In another embodiment, the TNFAIP6 protein is encoded by a nucleic acid molecule having a sequence selected from those set forth in GenBank Accession No. NM_{—}007115, M31165, AJ421518, and AJ419936. In another embodiment, the TNFAIP6 protein has an AA sequence set forth in one of the above GenBank entries. In another embodiment, the TNFAIP6 protein has an AA sequence selected from the sequences set forth in GenBank entries NP_{—}009046, AAB00792, AAH30205, CAD12353, and CAD13434. In another embodiment, the TNFAIP6 protein is encoded by a nucleic acid molecule comprising a sequence set forth in GenBank entry BC039384. In another embodiment, the TNFAIP6 protein has an AA sequence comprising an AA sequence set forth in GenBank entry BC039384. In another embodiment, the TNFAIP6 protein is encoded by any other TNFAIP6 gene sequence known in the art. In another embodiment, the TNFAIP6 protein is any other TNFAIP6 protein known in the art. In another embodiment, the TVM is an isoform of a TNFAIP6 protein. In another embodiment, the TVM is a homologue of a TNFAIP6 protein. In another embodiment, the TVM is a variant of a TNFAIP6 protein. In another embodiment, a TNFAIP6 precursor protein is utilized in methods and compositions of the present invention. In another embodiment, the protein is encoded by any TNFAIP6 precursor gene sequence known in the art. In another embodiment, the protein is any TNFAIP6 precursor protein known in the art. In another embodiment, the TVM is an isoform of a TNFAIP6 precursor protein. In another embodiment, the TVM is a homologue of a TNFAIP6 precursor protein. In another embodiment, a tumor necrosis factor-stimulated gene 6 (TSG-6) protein is utilized in methods and compositions of the present invention. In another embodiment, the protein is encoded by any TSG-6 gene sequence known in the art. In another embodiment, the protein is any TSG-6 protein known in the art. In another embodiment, the TVM is an isoform of a TSG-6 protein. In another embodiment, the TVM is a homologue of a TSG-6 protein. In another embodiment, the TVM is a fragment of a TNFAIP6 or TSG-6 protein. In another embodiment, the TVM is a fragment of an isoform, homologue, or variant of a TNFAIP6 or TSG-6 protein. Each possibility represents another embodiment of the present invention.

[0261] In another embodiment, the TVM is a TNFRSF21 protein. In another embodiment, the marker is a nucleic acid molecule encoding a TNFRSF21 protein. In another embodiment, the TNFRSF21 protein is encoded by a nucleic acid molecule having the sequence set forth in SEQ ID No: 69. In another embodiment, the TNFRSF21 protein is encoded by a nucleic acid molecule having a sequence set forth in GenBank Accession No. BC010241. In another embodiment, the TNFRSF21 protein is encoded by a nucleic acid molecule having a sequence selected from those set forth in GenBank Accession No. BC017730, NM_{—}014452, AY358304, BC005192, BC015466, AB209394, AJ420531, AF068868, AF208860, BC010241, BT007420, NP_{—}055267, or CR457190. In another embodiment, the TNFRSF21 protein has an AA sequence set forth in one of the above GenBank entries. In another embodiment, the TNFRSF21 protein is encoded by any other TNFRSF21 gene sequence known in the art. In another embodiment, the TNFRSF21 protein is any other TNFRSF21 protein known in the art. In another embodiment, the TVM is an isoform of a TNFRSF21 protein. In another embodiment, the TVM is a homologue of a TNFRSF21 protein. In another embodiment, the TVM is a variant of a TNFRSF21 protein. In another embodiment, a TNFR-related death receptor-6 (DR6) protein is utilized in methods and compositions of the present invention. In another embodiment, the protein is encoded by any DR6 gene sequence known in the art. In another embodiment, the protein is any DR6 protein known in the art. In another embodiment, the TVM is an isoform of a DR6 protein. In another embodiment, the TVM is a homologue of a DR6 protein. In another embodiment, a TNFRSF21 precursor protein is utilized in methods and compositions of the present invention. In another embodiment, the protein is encoded by any TNFRSF21 precursor gene sequence known in the art. In another embodiment, the protein is any TNFRSF21 precursor protein known in the art. In another embodiment, the TVM is an isoform of a TNFRSF21 precursor protein. In another embodiment, the TVM is a homologue of a TNFRSF21 precursor protein. In another embodiment, the TVM is a fragment of a TNFRSF21 protein, DR6 protein, or precursor thereof. In another embodiment, the TVM is a fragment of an isoform, homologue, or variant of a TNFRSF21 protein, DR6 protein, or precursor thereof. Each possibility represents another embodiment of the present invention.

[0262] In another embodiment, the TVM is an FZD10 protein. In another embodiment, the marker is a nucleic acid molecule encoding an FZD10 protein. In another embodiment, the FZD10 protein is encoded by a nucleic acid molecule having the sequence set forth in SEQ ID No: 37. In another embodiment, the FZD10 protein is encoded by a nucleic acid molecule having a sequence set forth in GenBank Accession No. AB027464. In another embodiment, the FZD10 protein is encoded by a nucleic acid molecule having a sequence selected from those set forth in GenBank Accession No. BC070037, BC074997, BC074998, NP_{—}009128, and NM_{—}007197. In another embodiment, the FZD10 protein has an AA sequence set forth in one of the above GenBank entries. In another embodiment, the FZD10 protein is encoded by any other FZD10 gene sequence known in the art. In another embodiment, the FZD10 protein is any other FZD10 protein known in the art. In another embodiment, the TVM is an isoform of an FZD10 protein. In another embodiment, the TVM is a homologue of an FZD10 protein. In another embodiment, the TVM is a variant of an FZD10 protein. In another embodiment, the TVM is a fragment of an FZD10 protein. In another embodiment, the TVM is a fragment of an isoform, homologue, or variant of an FZD10 protein. Each possibility represents another embodiment of the present invention.

[0263] In another embodiment, the TVM is an HOXA9 protein. In another embodiment, the marker is a nucleic acid molecule encoding an HOXA9 protein. In another embodiment, the HOXA9 protein is encoded by a nucleic acid molecule having the sequence:

(SEQ ID No: 85)

agtttcataatttccgtgggtcgggccgggcgggccaggcgctgggcacggtgatggccaccactggggccctgggcaactactacgt
ggactcgttcctgctgggcgccgacgccgcggatgagctgagcgttggccgctatgcgccggggaccctgggccagcctccccggcaggcggc
gacgctggccgagcaccccgacttcagcccgtgcagcttccagtccaaggcgacggtgtttggcgcctcgtggaacccagtgcacgcggcgggc
gccaacgctgtacccgctgcggtgtaccaccaccatcaccaccacccctacgtgcacccccaggcgcccgtggcggcggcggcgccggacgg
caggtacatgcgctcctggctggagcccacgcccggtgcgctctccttcgcgggcttgccctccagccggccttatggcattaaacctgaaccgctg
tcggccagaaggggtgactgtcccacgcttgacactcacactttgtccctgactgactatgcttgtggttctcctccagttgatagagaaaaacaaccc
agcgaaggcgccttctctgaaaacaatgctgagaatgagagcggcggagacaagccccccatcgatcccaataacccagcagccaactggcttc
atgcgcgctccactcggaaaaagcggtgcccctatacaaaacaccagaccctggaactggagaaagagtttctgttcaacatgtacctcaccaggg
accgcaggtacgaggtggctcgactgctcaacctcaccgagaggcaggtcaagatctggttccagaaccgcaggatgaaaatgaagaaaatcaa
caaagaccgagcaaaagacgagtgatgccatttgggcttatttagaaaaaagggtaagctagagagaaaaagaaagaactgtccgtcccccttccg
ccttctcccttttctcacccccaccctagcctccaccatccccgcacaaagcggctctaaacctcaggccacatcttttccaaggcaaaccctgttcag
gctggctcgtaggcctgccgctttgatggaggaggtattgtaagctttccattttctataagaaaaaggaaaagttgaggggggggcattagtgctgat
agctgtgtgtgttagcttgtatatatatttttaaaaatctacctgttcctgacttaaaacaaaaggaaagaaactacctttttataatgcacaactgttgatg
gtaggctgtatagtttttagtctgtgtagttaatttaatttgcagtttgtgcggcagattgctctgccaagatacttgaacactgtgttttattgtggtaatt
atgttttgtgattcaaacttctgtgtactgggtgatgcacccattgtgattgtggaagatagaattcaatttgaactcaggttgtttatgaggggaaaaaaac
agttgcatagagtatagctctgtagtggaatatgtcttctgtataactaggctgttaacctatgattgtaaagtagctgtaagaatttcccagtgaaataaaa
aaaaattttaagtgttctcggggatgcatagattcatcattttctccaccttaaaaatgcgggcatttaagtctgtccattatctatatagtcctgtcttgtc
tattgtatatataatctatatgattaaagaaaatatgcataatcagacaagcttgaatattgtttttgcaccagacgaacagtgaggaaattcggagctatac
atatgtgcagaaggttactacctagggtttatgcttaattttaatcggaggaaatgaatgctgattgtaacggagttaattttattgataataaattatacac
tatgaaaccgccattgggctactgtagatttgtatccttgatgaatctggggtttccatcagactgaacttacactgtatattttgcaatagttacctcaagg
cctactgaccaaattgtttgtgttgagatgatatttaactttttgccaaataaaatatattgattcttttctaaaaaaaaaaaaaaaaaaaa.

[0264] In another embodiment, the HOXA9 protein is encoded by a nucleic acid molecule having a sequence set forth in GenBank Accession No. BC006537. In another embodiment, the HOXA9 protein is encoded by a nucleic acid molecule having a sequence selected from those set forth in GenBank Accession No. BC010023, NM_{—}152739, U41813, NM_{—}002142, U82759, and BT006990. In another embodiment, the HOXA9 protein has an AA sequence set forth in one of the above GenBank entries. In another embodiment, the HOXA9 protein is encoded by any other HOXA9 gene sequence known in the art. In another embodiment, the HOXA9 protein is any other HOXA9 protein known in the art. In another embodiment, the TVM is an isoform of an HOXA9 protein. In another embodiment, the TVM is a homologue of an HOXA9 protein. In another embodiment, the TVM is a variant of an HOXA9 protein. In another embodiment, the TVM is a fragment of an HOXA9 protein. In another embodiment, the TVM is a fragment of an isoform, homologue, or variant of an HOXA9 protein. Each possibility represents another embodiment of the present invention.

[0265] In another embodiment, the TVM is an SLPI protein. In another embodiment, the marker is a nucleic acid molecule encoding an SLPI protein. In another embodiment, the SLPI protein is encoded by a nucleic acid molecule having the sequence:

(SEQ ID No: 86)

agagtcactcctgccttcaccatgaagtccagcggcctcttccccttcctggtgctgcttgccctgggaactctggcaccttgggctgtgga
aggctctggaaagtccttcaaagctggagtctgtcctcctaagaaatctgcccagtgccttagatacaagaaacctgagtgccagagtgactggcagt
gtccagggaagaagagatgttgtcctgacacttgtggcatcaaatgcctggatcctgttgacaccccaaacccaacaaggaggaagcctgggaagt
gcccagtgacttatggccaatgtttgatgcttaacccccccaatttctgtgagatggatggccagtgcaagcgtgacttgaagtgttgcatgggcatgt
gtgggaaatcctgcgtttcccctgtgaaagcttgattcctgccatatggaggaggctctggagtcctgctctgtgtggtccaggtcctttccaccctgag
acttggctccaccactgatatcctcctttggggaaaggcttggcacacagcaggctttcaagaagtgccagttgatcaatgaataaataaacgagcct
atttctctttgcaaaaaaaaaaaaaaaaaaaaaaaaaaaaaa.

In another embodiment, the SLPI protein is encoded by a nucleic acid molecule having a sequence set forth in GenBank Accession No. BC020708. In another embodiment, the SLPI protein is encoded by a nucleic acid molecule having a sequence selected from those set forth in GenBank Accession No. NM_{—}003064, X04470, X04503, and AF114471. In another embodiment, the SLPI protein has an AA sequence set forth in one of the above GenBank entries. In another embodiment, the SLPI protein is encoded by any other SLPI gene sequence known in the art. In another embodiment, the SLPI protein is any other SLPI protein known in the art. In another embodiment, the TVM is an isoform of an SLPI protein. In another embodiment, the TVM is a homologue of an SLPI protein. In another embodiment, the TVM is a variant of an SLPI protein. In another embodiment, the TVM is a fragment of an SLPI protein. In another embodiment, the TVM is a fragment of an isoform, homologue, or variant of an SLPI protein. Each possibility represents another embodiment of the present invention.

[0266] In another embodiment, the TVM is a KIBRA protein. In another embodiment, the marker is a nucleic acid molecule encoding a KIBRA protein. In another embodiment, the KIBRA protein is encoded by a nucleic acid molecule having the sequence:

(SEQ ID No: 87)

caaccttctcagctacaaatacttgaagaaacagagcagggagctcaagccagtgggagtcatggcccctgcctcagggcctgccagc
acggacgctgtgtctgctctgttggaacagacagcagtggagctggagaagaggcaggagggcaggagcagcacacagacactggaagacag
ctggaggtatgaggagaccagtgagaatgaggcagtagccgaggaagaggaggaggaggtggaggaggaggagggagaagaggatgttttc
accgagaaagcctcacctgatatggatgggtacccagcattaaaggtggacaaagagaccaacacggagaccccggccccatcccccacagtgg
tgcgacctaaggaccggagagtgggcaccccgtcccaggggccatttcttcgagggagcaccatcatccgctctaagaccttctccccaggaccc
cagagccagtacgtgtgccggctgaatcggagtgatagtgacagctccactctgtccaaaaagccaccttttgttcgaaactccctggagcgacgca
gcgtccggatgaagcggccttcctcggtcaagtcgctgcgctccgagcgtctgatccgtacctcgctggacctggagttagacctgcaggcgacaa
gaacctggcacagccaattgacccaggagatctcggtgctgaaggagctcaaggagcagctggaacaagccaagagccacggggagaaggag
ctgccacagtggttgcgtgaggacgagcgtttccgcctgctgctgaggatgctggagaagcggcagatggaccgagcggagcacaagggtgag
cttcagacagacaagatgatgagggcagctgccaaggatgtgcacaggctccgaggccagagctgtaaggaacccccagaagttcagtctttcag
ggagaagatggcatttttcacccggcctcggatgaatatcccagctctctctgcagatgacgtctaatcgccagaaaagtatttcctttgttccactgac
caggctgtgaacattgactgtggctaaagttatttatgtggtgttatatgaaggtactgagtcacaagtcctctagtgctcttgttggtttgaagatgaacc
gactttttagtttgggtcctactgttgttattaaaaaaaaaaaaaaaacaaaaaaaaaaaaaaaaaaaaaaaaaaa.

In another embodiment, the KIBRA protein is encoded by a nucleic acid molecule having a sequence set forth in GenBank Accession No. BC004394. In another embodiment, the KIBRA protein is encoded by a nucleic acid molecule having a sequence selected from those set forth in GenBank Accession No. AK001727, NM_{—}015238, BC017746, AF506799, AY189820, AF530058, AB020676, and BX640827. In another embodiment, the KIBRA protein has an AA sequence set forth in one of the above GenBank entries. In another embodiment, the KIBRA protein is encoded by any other KIBRA gene sequence known in the art. In another embodiment, the KIBRA protein is any other KIBRA protein known in the art. In another embodiment, the TVM is an isoform of a KIBRA protein. In another embodiment, the TVM is a homologue of a KIBRA protein. In another embodiment, the TVM is a variant of a KIBRA protein. In another embodiment, the TVM is a fragment of a KIBRA protein. In another embodiment, the TVM is a fragment of an isoform, homologue, or variant of a KIBRA protein. Each possibility represents another embodiment of the present invention.

[0267] In another embodiment, the TVM is an IL10RA protein. In another embodiment, the marker is a nucleic acid molecule encoding an IL10RA protein. In another embodiment, the IL10RA protein is encoded by a nucleic acid molecule having the sequence:

(SEQ ID No: 142)

tggaggcgcgcaggccggctccgctccggccccggacgatgcggcgcgcccaggatgctgccgtgcctcgtagtgctgctggcggc
gctcctcagcctccgtcttggctcagacgctcatgggacagagctgcccagccctccgtctgtgtggtttgaagcagaatttttccaccacatcctcca
ctggacacccatcccaaatcagtctgaaagtacctgctatgaagtggcactcctgaggtatggaatagagtcctggaactccatctccaactgtagcc
agaccctgtcctatgaccttaccgcagtgaccttggacctgtaccacagcaatggctaccgggccagagtgcgggctgtggacggcagccggcac
tccaactggaccgtcaccaacacccgcttctctgtggatgaagtgactctgacagttggcagtgtgaacctagagatccacaatggcttcatcctcgg
gaagattcagctacccaggcccaagatggcccccgcaaatgacacatatgaaagcatcttcagtcacttccgagagtatgagattgccattcgcaag
gtgccgggaaacttcacgttcacacacaagaaagtaaaacatgaaaacttcagcctcctaacctctggagaagtgggagagttctgtgtccaggtga
aaccatctgtcgcttcccgaagtaacaaggggatgtggtctaaagaggagtgcatctccctcaccaggcagtatttcaccgtgaccaacgtcatcatc
ttctttgcctttgtcctgctgctctccggagccctcgcctactgcctggccctccagctgtatgtgcggcgccgaaagaagctacccagtgtcctgctct
tcaagaagcccagccccttcatcttcatcagccagcgtccctccccagagacccaagacaccatccacccgcttgatgaggaggcctttttgaaggt
gtccccagagctgaagaacttggacctgcacggcagcacagacagtggctttggcagcaccaagccatccctgcagactgaagagccccagttcc
tcctccctgaccctcacccccaggctgacagaacgctgggaaacggggagccccctgtgctgggggacagctgcagtagtggcagcagcaatag
cacagacagcgggatctgcctgcaggagcccagcctgagccccagcacagggcccacctgggagcaacaggtggggagcaacagcaggggc
caggatgacagtggcattgacttagttcaaaactctgagggccgggctggggacacacagggtggctcggccttgggccaccacagtcccccgg
agcctgaggtgcctggggaagaagacccagctgctgtggcattccagggttacctgaggcagaccagatgtgctgaagagaaggcaaccaagac
aggctgcctggaggaagaatcgcccttgacagatggccttggccccaaattcgggagatgcctggttgatgaggcaggcttgcatccaccagccct
ggccaagggctatttgaaacaggatcctctagaaatgactctggcttcctcaggggccccaacgggacagtggaaccagcccactgaggaatggt
cactcctggccttgagcagctgcagtgacctgggaatatctgactggagctttgcccatgaccttgcccctctaggctgtgtggcagccccaggtggt
ctcctgggcagctttaactcagacctggtcaccctgcccctcatctctagcctgcagtcaagtgagtgactcgggctgagaggctgcttttgattttagc
catgcctgctcctctgcctggaccaggaggagggcccctggggcagaagttaggcacgaggcagtctgggcacttttctgcaagtccactggggc
tggccccagccaggccctgcagggctggtcagggtgtctggggcaggaggaggccaactcactgaactagtgcagggtatgtgggtggcactga
cctgttctgttgactggggccctgcagactctggcagagctgagaagggcagggaccttctccctcctaggaactctttcctgtatcataaaggattatt
tgctcaggggaaccatggggctttctggagttgtggtgaggccaccaggctgaagtcagctcagacccagacctccctgcttaggccactcgagca
tcagagcttccagcaggaggaagggctgtaggaatggaagcttcagggccttgctgctggggtcatttttaggggaaaaaggaggatatgatggtc
acatggggaacctcccctcatcgggcctctggggcaggaagcttgtcactggaagatcttaaggtatatattttctggacactcaaacacatcataatg
gattcactgaggggagacaaagggagccgagaccctggatggggcttccagctcagaacccatccctctggtgggtacctctggcacccatctgc
aaatatctccctctctccaacaaatggagtagcatccccctggggcacttgctgaggccaagccactcacatcctcactttgctgccccaccatcttgc
tgacaacttccagagaagccatggttttttgtattggtcataactcagccctttgggcggcctctgggcttgggcaccagctcatgccagccccagag
ggtcagggttggaggcctgtgcttgtgtttgctgctaatgtccagctacagacccagaggataagccactgggcactgggctggggtccctgccttg
ttggtgttcagctgtgtgattttggactagccacttgtcagagggcctcaatctcccatctgtgaaataaggactccacctttaggggaccctccatgttt
gctgggtattagccaagctggtcctgggagaatgcagatactgtccgtggactaccaagctggcttgtttcttatgccagaggctaacagatccaatg
ggagtccatggtgtcatgccaagacagtatcagacacagccccagaagggggcattatgggccctgcctccccataggccatttggactctgccttc
aaacaaaggcagttcagtccacaggcatggaagctgtgaggggacaggcctgtgcgtgccatccagagtcatctcagccctgcctttctctggagc
atttctgaaaacagatattctggcccagggaatccagccatgacccccacccctctgccaaagtactcttaggtgccagtctggtaactgaactccctct
ggaggcaggcttgagggaggattcctcagggttcccttgaaagcttatttatttattttgttcatttatttattggagaggcagcattgcacagtgaaaga
attctggatatctcaggagcccgaaattctagctctgactttgctgtttccagtggtatgaccttggagaagtcacttatcctcttggagcctcagtttcct
catctgcagaataatgactgacttgtctaattcgtagggatgtgaggttctgctgaggaaatgggtatgaatgtgccttgaacacaaagctctgtcata
agtgatacatgttttttattccaataaattgtcaagaccacaaaaaaaaaaaaaaaaaaaaaaaaaaaaaaaaaaaaaaaaaaaaaaaaaaaaaaaaa
aaaaaa.

In another embodiment, the IL10RA protein is encoded by a nucleic acid molecule having a sequence set forth in GenBank Accession No. BC028082. In another embodiment, the IL10RA protein is encoded by a nucleic acid molecule having a sequence selected from those set forth in GenBank Accession No. NM_{—}001558, AB209626, U00672, and BC028082. In another embodiment, the IL10RA protein has an AA sequence set forth in one of the above GenBank entries. In another embodiment, the IL10RA protein is encoded by any other IL10RA gene sequence known in the art. In another embodiment, the IL10RA protein is any other IL10RA protein known in the art. In another embodiment, the TVM is an isoform of an IL10RA protein. In another embodiment, the TVM is a homologue of an IL10RA protein. In another embodiment, the TVM is a variant of an IL10RA protein. In another embodiment, the TVM is a fragment of an IL10RA protein. In another embodiment, the TVM is a fragment of an isoform, homologue, or variant of an IL10RA protein. Each possibility represents another embodiment of the present invention.

[0268] In another embodiment, the TVM is an ADAM12 protein. In another embodiment, the marker is a nucleic acid molecule encoding an ADAM12 protein. In another embodiment, the ADAM12 nucleotide is a long isoform of ADAM12. In another embodiment, the ADAM12 nucleotide is a short isoform of ADAM12. In another embodiment, the ADAM12 protein is encoded by a nucleic acid molecule having the sequence:

(SEQ ID No: 1)

cactaacgctcttcctagtccccgggccaactcggacagtttgctcatttattgcaacggtcaaggctggcttgtgccagaacggcgcgc
gcgcgacgcacgcacacacacggggggaaacttttttaaaaatgaaaggctagaagagctcagcggcggcgcgggccgtgcgcgagggctcc
ggagctgactcgccgaggcaggaaatccctccggtcgcgacgcccggccccgctcggcgcccgcgtgggatggtgcagcgctcgccgccggg
cccgagagctgctgcactgaaggccggcgacgatggcagcgcgcccgctgcccgtgtcccccgcccgcgccctcctgctcgccctggccggtg
ctctgctcgcgccctgcgaggcccgaggggtgagcttatggaaccaaggaagagctgatgaagttgtcagtgcctctgttcggagtggggacctct
ggatcccagtgaagagcttcgactccaagaatcatccagaagtgctgaatattcgactacaacgggaaagcaaagaactgatcataaatctggaaa
gaaatgaaggtctcattgccagcagtttcacggaaacccactatctgcaagacggtactgatgtctccctcgctcgaaattacacggtaattctgggtc
actgttactaccatggacatgtacggggatattctgattcagcagtcagtctcagcacgtgttctggtctcaggggacttattgtgtttgaaaatgaaagc
tatgtcttagaaccaatgaaaagtgcaaccaacagatacaaactcttcccagcgaagaagctgaaaagcgtccggggatcatgtggatcacatcaca
acacaccaaacctcgctgcaaagaatgtgtttccaccaccctctcagacatgggcaagaaggcataaaagagagaccctcaaggcaactaagtatg
tggagctggtgatcgtggcagacaaccgagagtttcagaggcaaggaaaagatctggaaaaagttaagcagcgattaatagagattgctaatcacg
ttgacaagttttacagaccactgaacattcggatcgtgttggtaggcgtggaagtgtggaatgacatggacaaatgctctgtaagtcaggacccattca
ccagcctccatgaatttctggactggaggaagatgaagcttctacctcgcaaatcccatgacaatgcgcagcttgtcagtggggtttatttccaaggga
ccaccatcggcatggccccaatcatgagcatgtgcacggcagaccagtctgggggaattgtcatggaccattcagacaatccccttggtgcagccg
tgaccctggcacatgagctgggccacaatttcgggatgaatcatgacacactggacaggggctgtagctgtcaaatggcggttgagaaaggaggct
gcatcatgaacgcttccaccgggtacccatttcccatggtgttcagcagttgcagcaggaaggacttggagaccagcctggagaaaggaatgggg
gtgtgcctgtttaacctgccggaagtcagggagtctttcgggggccagaagtgtgggaacagatttgtggaagaaggagaggagtgtgactgtggg
gagccagaggaatgtatgaatcgctgctgcaatgccaccacctgtaccctgaagccggacgctgtgtgcgcacatgggctgtgctgtgaagactgc
cagctgaagcctgcaggaacagcgtgcagggactccagcaacrcctgtgacctcccagagttctgcacaggggccagccctcactgcccagcca
acgtgtacctgcacgatgggcactcatgtcaggatgtggacggctactgctacaatggcatctgccagactcacgagcagcagtgtgtcacactctg
gggaccaggtgctaaacctgcccctgggatctgctttgagagagtcaattctgcaggtgatccttatggcaactgtggcaaagtctcgaagagttcctt
tgccaaatgcgagatgagagatgctaaatgtggaaaaatccagtgtcaaggaggtgccagccggccagtcattggtaccaatgccgtttccatagaa
acaaacatccccctgcagcaaggaggccggattctgtgccgggggacccacgtgtacttgggcgatgacatgccggacccagggcttgtgcttgc
aggcacaaagtgtgcagatggaaaaatctgcctgaatcgtcaatgtcaaaatattagtgtctttggggttcacgagtgtgcaatgcagtgccacggca
gaggggtgtgcaacaacaggaagaactgccactgcgaggcccactgggcacctcccttctgtgacaagtttggctttggaggaagcacagacagc
ggccccatccggcaagcagataaccaaggtttaaccataggaattctggtgaccatcctgtgtcttcttgctgccggatttgtggtttatctcaaaagga
agaccttgatacgactgctgtttacaaataagaagaccaccattgaaaaactaaggtgtgtgcgcccttcccggccaccccgtggcttccaaccctgt
caggctcacctcggccaccttggaaaaggcctgatgaggaagccgccagattcctacccaccgaaggacaatcccaggagattgctgcagtgtca
gaatgttgacatcagcagacccctcaacggcctgaatgtccctcagccccagtcaactcagcgagtgcttcctcccctccaccgggccccacgtgc
acctagcgtccctgccagacccctgccagccaagcctgcacttaggcaggcccaggggacctgtaagccaaacccccctcagaagcctctgcctg
cagatcctctggccagaacaactcggctcactcatgccttggccaggaccccaggacaatgggagactgggctccgcctggcacccctcagacct
gctccacaatatccacaccaagtgcccagatccacccacaccgcctatattaagtgagaagccgacaccttttttcaacagtgaagacagaagtttgc
actatctttcagctccagttggagttttttgtaccaacttttaggattttttttaatgtttaaaacatcattactataagaactttgagctactgccgtcagt
gctgtgctgtgctatggtgctctgtctacttgcacaggtacttgtaaattattaatttatgcagaatgttgattacagtgcagtgcgctgtagtaggcatttt
taccatcactgagttttccatggcaggaaggcttgttgtgcttttagtattttagtgaacttgaaatatcctgcttgatgggattctggacaggatgtgtttg
ctttctgatcaaggccttattggaaagcagtcccccaactacccccagctgtgcttatggtaccagatgcagctcaagagatcccaagtagaatctcagttga
ttttctggattccccatctcaggccagagccaaggggcttcaggtccaggctgtgtttggctttcagggaggccctgtgccccttgacaactggcaggca
ggctcccagggacacctgggagaaatctggcttctggccaggaagctttggtgagaacctgggttgcagacaggaatcttaaggtgtagccacacc
aggatagagactggaacactagacaagccagaacttgaccctgagctgaccagccgtgagcatgtttggaaggggtctgtagtgtcactcaaggc
ggtgcttgatagaaatgccaagcacttctttttctcgctgtcctttctagagcactgccaccagtaggttatttagcttgggaaaggtggtgtttctgtaag
aaacctactgcccaggcactgcaaaccgccacctccctatactgcttggagctgagcaaatcaccacaaactgtaatacaatgatcctgtattcagac
agatgaggactttccatgggaccacaactattttcagatgtgaaccattaaccagatctagtcaatcaagtctgtttactgcaaggttcaacttattaacaa
ttaggcagactctttatgcttgcaaaaactacaaccaatggaatgtgatgttcatgggtatagttcatgtctgctatcattattcgtagatattggacaaag
aaccttctctatggggcatcctctttttccaacttggctgcaggaatctttaaaagatgcttttaacagagtctgaacctatttcttaaacacttgcaactac
ctgttgagcatcacagaatgtgataaggaaatcaacttgcttatcaacttcctaaatattatgagatgtggcttgggcagcatccccttgaactcttcactc
ttcaaatgcctgactagggagccatgtttcacaaggtctttaaagtgactaatggcatgagaaatacaaaaatactcagataaggtaaaatgccatgat
gcctctgtcttctggactggttttcacattagaagacaattgacaacagttacataattcactctgagtgttttatgagaaagccttcttttggggtcaacag
ttttcctatgctttgaaacagaaaaatatgtaccaagaatcttggtttgccttccagaaaacaaaactgcatttcactttcccggtgtccccactgtatcta
ggcaacatagtattcatgactatggataaactaaacacgtgacacaaacacacacaaaagggaacccagctctaatacattccaactcgtatagcatg
catctgtttattctatagttattaagttctttaaaatgtaaagccatgctggaaaataatactgctgagatacatacagaattactgtaactgattacacttg
gtaattgtactaaagccaaacatatatatactattaaaaaggtttacagaattttatggtgcattacgtgggcattgtctttttagatgcccaaatccttaga
tctggcatgttagcccttcctccaattataagaggatatgaaccaaaaaaaaaaaaaaaaaaa.

In another embodiment, the ADAM12 protein is encoded by a nucleic acid molecule with a sequence set forth in SEQ ID No: 269. In another embodiment, the ADAM12 protein is a long isoform of ADAM12. In another embodiment, the ADAM12 protein is a short isoform of ADAM12. In another embodiment, the ADAM12 protein is encoded by a nucleic acid molecule having a sequence set forth in GenBank Accession No. AF023476. In another embodiment, the ADAM12 protein is encoded by a nucleic acid molecule having a sequence set forth in GenBank Accession No. AF023477. In another embodiment, the ADAM12 protein is encoded by a nucleic acid molecule having a sequence set forth in GenBank Accession No. NM_{—}003474. In another embodiment, the ADAM12 protein has an AA sequence set forth in 1 of the above GenBank entries. In another embodiment, the ADAM12 protein is encoded by any other ADAM12 gene sequence known in the art. In another embodiment, the ADAM12 protein is any other ADAM12 protein known in the art. In another embodiment, the TVM is an isoform of an ADAM12 protein. In another embodiment, the TVM is a homologue of an ADAM12 protein. In another embodiment, the TVM is a variant of an ADAM12 protein. In another embodiment, the TVM is a fragment of an ADAM12 protein. In another embodiment, the TVM is a fragment of an isoform, homologue, or variant of an ADAM12 protein. Each possibility represents another embodiment of the present invention.

[0269] In another embodiment, the TVM is a PCDH17 protein. In another embodiment, the marker is a nucleic acid molecule encoding a PCDH17 protein. In another embodiment, the PCDH17 protein is encoded by a nucleic acid molecule having the sequence set forth in SEQ ID No: 49. In another embodiment, the PCDH17 protein is encoded by a nucleic acid molecule having a sequence set forth in GenBank Accession No. AL137505. In another embodiment, the PCDH17 protein has an AA sequence set forth in GenBank Accession No. AL137505. In another embodiment, the PCDH17 protein is encoded by any other PCDH17 gene sequence known in the art. In another embodiment, the PCDH17 protein is any other PCDH17 protein known in the art. In another embodiment, the TVM is an isoform of a PCDH17 protein. In another embodiment, the TVM is a homologue of a PCDH17 protein. In another embodiment, the TVM is a variant of a PCDH17 protein. In another embodiment, the TVM is a fragment of a PCDH17 protein. In another embodiment, the TVM is a fragment of an isoform, homologue, or variant of a PCDH17 protein. Each possibility represents another embodiment of the present invention.

[0270] In another embodiment, the TVM is an AML-1 protein. In another embodiment, the marker is a nucleic acid molecule encoding an AML-1 protein. In another embodiment, the AML-1 protein is encoded by a nucleic acid molecule having the sequence:

(SEQ ID No: 5)

catagagccagcgggcgcgggcgggacgggcgccccgcggccggacccagccagggcaccacgctgcccggccctgcgccgcc
aggcacttctttccggggctcctagggacgccagaaggaagtcaacctctgctgcttctccttggcctgcgttggaccttcctttttttgttgtttttttttg
tttttcccctttcttccttttgaattaactggcttcttggctggatgttttcaacttctttcctggctgcgaacttttccccaattgttttccttttacaaca
gggggagaaagtgctctgtggtccgaggcgagccgtgaagttgcgtgtgcgtggcagtgtgcgtggcaggatgtgcgtgcgtgtgtaacccgagccgcccg
atctgtttcgatctgcgccgcggagccctccctcaaggcccgctccacctgctgcggttacgcggcgctcgtgggtgttcgtgcctcggagcagcta
accggcgggtgctgggcgacggtggaggagtatcgtctcgctgctgcccgagtcagggctgagtcacccagctgatgtagacagtggctgccttc
cgaagagtgcgtgtttgcatgtgtgtgactctgcggctgctcaactcccaacaaaccagaggaccagccacaaacttaaccaacatccccaaaccc
gagttcacagatgtgggagagctgtagaaccctgagtgtcatcgactgggccttcttatgattgttgttttaagattagctgaagatctctgaaacgctg
aattttctgcactgagcgttttgacagaattcattgagagaacagagaacatgacaagtacttctagctcagcactgctccaactactgaagctgattttc
aaggctacttaaaaaaatctgcagcgtacattaatggatttctgttgtgtttaaattctccacagattgtattgtaaatattttatgaagtagagcatatgta
tatatttatatatacgtgcacatacattagtagcactacctttggaagtctcagctcttgcttttcgggactgaagccagttttgcatgataaaagtggcctt
gttacgggagataattgtgttctgttgggactttagacaaaactcacctgcaaaaaactgacaggcattaactactggaacttccaaataatgtgtttgctga
tcgttttactcttcgcataaatattttaggaagtgtatgagaattttgccttcaggaacttttctaacagccaaagacagaacttaacctctgcaagcaagat
tcgtggaagatagtctccactttttaatgcactaagcaatcggttgctaggagcccatcctgggtcagaggccgatccgcagaaccagaacgttttccc
ctcctggactgttagtaacttagtctccctcctcccctaaccacccccgcccccccccaccccccgcagtaataaaggcccctgaacgtgtatgttggt
ctcccgggagctgcttgctgaagatccgcgcccctgtcgccgtctggtaggagctgtttgcagggtcctaactcaatcggcttgttgtgatgcgtatcc
ccgtagatgccagcacgagccgccgcttcacgccgccttccaccgcgctgagcccaggcaagatgagcgaggcgttgccgctgggcgccccgg
acgccggcgctgccctggccggcaagctgaggagcggcgaccgcagcatggtggaggtgctggccgaccacccgggcgagctggtgcgcac
cgacagccccaacttcctctgctccgtgctgcctacgcactggcgctgcaacaagaccctgcccatcgctttcaaggtggtggccctaggggatgtt
ccagatggcactctggtcactgtgatggctggcaatgatgaaaactactcggctgagctgagaaatgctaccgcagccatgaagaaccaggagca
agatttaatgacctcaggtttgtcggtcgaagtggaagagggaaaagcttcactctgaccatcactgtcttcacaaacccaccgcaagtcgccaccta
ccacagagccatcaaaatcacagtggatgggccccgagaacctcgaagacatcggcagaaactagatgatcagaccaagcccgggagcttgtcc
ttttccgagcggctcagtgaactggagcagctgcggcgcacagccatgagggtcagcccacaccacccagcccccacgcccaaccctcgtgcct
ccctgaaccactccactgcctttaaccctcagcctcagagtcagatgcaggatacaaggcagatccaaccatccccaccgtggtcctacgatcagtc
ctaccaatacctgggatccattgcctctccttctgtgcacccagcaacgcccatttcacctggacgtgccagcggcatgacaaccctctctgcagaac
tttccagtcgactctcaacggcacccgacctgacagcgttcagcgacccgcgccagttccccgcgctgccctccatctccgacccccgcatgcact
atccaggcgccttcacctactccccgacgccggtcacctcgggcatcggcatcggcatgtcggccatgggctcggccacgcgctaccacacctac
ctgccgccgccctaccccggctcgtcgcaagcgcagggaggcccgttccaagccagctcgccctcctaccacctgtactacggcgcctcggccg
gctcctaccagttctccatggtgggcggcgagcgctcgccgccgcgcatcctgccgccctgcaccaacgcctccaccggctccgcgctgctcaac
cccagcctcccgaaccagagcgacgtggtggaggccgagggcagccacagcaactcccccaccaacatggcgccctccgcgcgcctggagga
ggccgtgtggaggccctactgaggcgccaggcctggcccggctgggccccgcgggccgccgccttcgcctccgggcgcgcgggcctcctgttc
gcgacaagcccgccgggatcccgggccctgggcccggccaccgtcctggggccgagggcgcccgacggccaggatctcgctgtaggtcagg
cccgcgcagcctcctgcgcccagaagcccacgccgccgccgtctgctggcgccccggccctcgcggaggtgtccgaggcgacgcacctcgag
ggtgtccgccggccccagcacccaggggacgcgctggaaagcaaacaggaagattcccggagggaaactgtgaatgcttctgatttagcaatgct
gtgaataaaaagaaagattttatacccttgcttaactttttaaccaagttgtttattccaaagagtgtggaattttggttggggtggggggagaggaggg
atgcaactcgccctgtttggcatctaattcttatttttaatttttccgcaccttatcaattgcaaaatgcgtatttgcatttgggtggtttttatttttatat
acgtttatataaatatatataaattgagcttgcttctttcttgctttgaccatggaaagaaatatgattcccttttctttaagttttatttaacttttctttt
ggacttttgggtagttgtttttttttgttttgttttgtttttttgagaaacagctacagctttgggtcatttttaactactgtattcccacaaggaatcccca
gatatttatgtatcttgatgttcagacatttatgtgttgataattttttaattatttaaatgtacttatattaagaaaaatatcaagtactacattttctttt
gttcttgatagtagccaaagttgtatcacattgaagaaggctagaaaaaaagaatgagtaatgtgatcgcttggttatccagaagtattgtttacattaaact
ccctttcatgttaatcaaacaagtgagtagctcacgcagcaacgtttttaataggatttttagacactgagggtcactccaaggatcagaagtatggaatttt
ctgccaggctcaacaagggtctcatatctaacttcctccttaaaacagagaaggtcaatctagttccagagggttgaggcaggtgccaataattacatctttg
gagaggatttgatttctgcccagggatttgctcaccccaaggtcatctgataatttcacagatgctgtgtaacagaacacagccaaagtaaactgtgtagggg
agccacatttacataggaaccaaatcaatgaatttaggggttacgattatagcaatttaagggccaccagaagcaggcctcgaggagtcaatttgcctctgtg
tgcctcagtggagacaagtgggaaaacatggtcccacctgtgcgagaccccctgtcctgtgctgctcactcaacaacatctttgtgttgctttcaccaggctg
agaccctaccctatggggtatatgggcttttacctgtgcaccagtgtgacaggaaagattcatgtcactactgtccgtggctacaattcaaaggtatcca
atgtcgctgtaaattttatggcactatttttattggaggatttggtcagaatgcagttgttgtacaactcataaatactaactgctgattttgacacatgtgt
gctccaaatgatctggtggttatttaacgtacctcttaaaattcgttgaaacgatttcaggtcaactctgaagagtatttgaaagcaggacttcagaacagtg
tttgatttttattttataaattaagcattcaaattaggcaaatctttggctgcaggcagcaaaaacagctggacttatttaaaacaacttgtttttgagtttt
cttatatatatattgattatttgttttacacacatgcagtagcactttggtaagagttaaagagtaaagcagcttatgttgtcaggtcgttcttatctagaga
agagctatagcagatctcggacaaactcagaatatattcactttcatttttgacaggattccctccacaactcagtttcatatattattccgtattacatttt
tgcagctaaattaccataaaatgtcagcaaatgtaaaaatttaatttctgaaaagcaccattagcccatttcccccaaattaaacgtaaatgttttttttcag
cacatgttaccatgtctgacctgcaaaaatgctggagaaaaatgaaggaaaaaattatgtttttcagtttaattctgttaactgaagatattccaactcaaaa
ccagcctcatgctctgattagataatcttttacattgaacctttactctcaaagccatgtgtggagggggcttgtcactattgtaggctcactggattggtca
tttagagtttcacagactcttaccagcatatatagtatttaattgtttcaaaaaaaatcaaactgtagttgttttggcgataggtctcacgcaacacattttt
gtatgtgtgtgtgtgtgcgtgtgtgtgtgtgtgtgtgaaaaattgcattcattgacttcaggtagattaaggtatctttttattcattgccctcaggaaagtt
aaggtatcaatgagacccttaagccaatcatgtaataactgcatgtgtctggtccaggagaagtattgaataagccatttctactgcttactcatgtccctat
ttatgatttcaacatggatacatatttcagttctttctttttctcactatctgaaaatacatttccctccctctcttccccccaatatctccctttttttctc
tcttcctctatcttccaaaccccactttctccctcctccttttcctgtgttctcttaagcagatagcacatacccccacccagtaccaaatttcagaacacaa
gaaggtccagttcttcccccttcacataaaggaacatggtttgtcagcctttctcctgtttatggtttcttccagcagaacagagacattgccaaccatattg
gatctgcttgctgtccaaaccagcaaactttcctgggcaaatcacaatcagtgagtaaatagacagcctttctgctgccttgggtttctgtgcagataaacag
aaatgctctgattagaaaggaaatgaatggttccactcaaatgtcctgcaatttaggattgcagatttctgccttgaaatacctgtttctttgggacatttcc
gtcctgatgatttttattttgttggtttttatttttggggggaatgacatgtttgggtcttttatacatgaaaatttgtttgacaataatctcacaaaacata
ttttacatctgaacaaaatgcctttttgtttaccgtagcgtatacatttgttttgggatttttgtgtgtttgttgggaattttgtttttagccaggtcagtat
tgatgaggctgatcatttggctctttttttccttccagaagagttgcatcaacaaagttaattgtatttatgtatgtaaatagattttaagcttcattataaa
tattgttaatgcctataactttttttcaatttttttgtgtgtgtttctaagactttttcttaggtttgctaaatactgtagggaaaaaaatgcttctttctac
tttgtttattttagactttaaaatgagctacttcttattcacttttgtaaacagctaatagcatggttccaattttttttaagttcactttttttgttctagg
ggaaatgaatgtgcaaaaaaagaaaaagaactgttggttatttgtgttattctggatgtataaaaatcaatggaaaaaaataaactttcaaattgaaatgacg
gtataacacatctactgaaaaagcaacgggaaatgtggtcctatttaagccagcccccacctagggtctatttgtgtggcagttattgggtttggtcacaaaa
catcctgaaaattcgtgcgtgggcttctttctccctggtacaaacgtatggaatgcttcttaaaggggaactgtcaagctggtgtcttcagccagatgacatg
agagaatatcccagaaccctctctccaaggtgtttctagatagcacaggagagcaggcactgcactgtccacagtccacggtacacagtcgggtgggccgcct
cccctctcctgggagcattcgtcgtgcccagcctgagcagggcagctggactgctgctgttcaggagccaccagagccttcctctctttgtaccacagtttct
tctctaaatccagtgttacaatcagtgtgaatggcaaataaacagtttgacaagtacatacaccataaaaaaaaaaaaaaaa.

In another embodiment, the AML-1 protein is encoded by a nucleic acid molecule having a sequence set forth in GenBank Accession No. NM_{—}001001890. In another embodiment, the AML-1 protein is encoded by a nucleic acid molecule having a sequence set forth in GenBank Accession No. NM_{—}001754. In another embodiment, the AML-1 protein has an AA sequence set forth in 1 of the above GenBank entries. In another embodiment, the AML-1 protein is encoded by any other AML-1 gene sequence known in the art. In another embodiment, the AML-1 protein is any other AML-1 protein known in the art. In another embodiment, the TVM is an isoform of an AML-1 protein. In another embodiment, the TVM is a homologue of an AML-1 protein. In another embodiment, the TVM is a variant of an AML-1 protein. In another embodiment, the TVM is a fragment of an AML-1 protein. In another embodiment, the TVM is a fragment of an isoform, homologue, or variant of an AML-1 protein. Each possibility represents another embodiment of the present invention.

[0271] In another embodiment, the TVM is a SLIT2 protein. In another embodiment, the marker is a nucleic acid molecule encoding a SLIT2 protein. In another embodiment, the SLIT2 protein is encoded by a nucleic acid molecule having the sequence:

(SEQ ID No: 59)

cagagcagggtggagagggcggtgggaggcgtgtgcctgagtgggctctactgccttgttccatattattttgtgcacattttccctggca
ctctgggttgctagccccgccgggcactgggcctcagacactgcgcggttccctcggagcagcaagctaaagaaagcccccagtgccggcgag
gaaggaggcggcggggaaagatgcgcggcgttggctggcagatgctgtccctgtcgctggggttagtgctggcgatcctgaacaaggtggcacc
gcaggcgtgcccggcgcagtgctcttgctcgggcagcacagtggactgtcacgggctggcgctgcgcagcgtgcccaggaatatcccccgcaac
accgagagactggatttaaatggaaataacatcacaagaattacgaagacagattttgctggtcttagacatctaagagttcttcagcttatggagaata
agattagcaccattgaaagaggagcattccaggatcttaaagaactagagagactgcgtttaaacagaaatcaccttcagctgtttcctgagttgctgtt
tcttgggactgcgaagctatacaggcttgatctcagtgaaaaccaaattcaggcaatcccaaggaaagctttccgtggggcagttgacataaaaaattt
gcaactggattacaaccagatcagctgtattgaagatggggcattcagggctctccgggacctggaagtgctcactctcaacaataacaacattacta
gactttctgtggcaagtttcaaccatatgcctaaacttaggacttttcgactgcattcaaacaacctgtattgtgactgccacctggcctggctctccgact
ggcttcgccaaaggcctcgggttggtctgtacactcagtgtatgggcccctcccacctgagaggccataatgtagccgaggttcaaaaacgagaatt
tgtctgcagtggtcaccagtcatttatggctccttcttgtagtgttttgcactgccctgccgcctgtacctgtagcaacaatatcgtagactgtcgtgggaa
aggtctcactgagatccccacaaatcttccagagaccatcacagaaatacgtttggaacagaacacaatcaaagtcatccctcctggagctttctcac
catataaaaagcttagacgaattgacctgagcaataatcagatctctgaacttgcaccagatgctttccaaggactacgctctctgaattcacttgtcctc
tatggaaataaaatcacagaactccccaaaagtttatttgaaggactgttttccttacagctcctattattgaatgccaacaagataaactgccttcgggta
gatgcttttcaggatctccacaacttgaaccttctctccctatatgacaacaagcttcagaccatcgccaaggggaccttttcacctcttcgggccattca
aactatgcatttggcccagaacccctttatttgtgactgccatctcaagtggctagcggattatctccataccaacccgattgagaccagtggtgcccgt
tgcaccagcccccgccgcctggcaaacaaaagaattggacagatcaaaagcaagaaattccgttgttcagctaaagaacagtatttcattccaggta
cagaagattatcgatcaaaattaagtggagactgctttgcggatctggcttgccctgaaaagtgtcgctgtgaaggaaccacagtagattgctctaatc
aaaagctcaacaaaatcccggagcacattccccagtacactgcagagttgcgtctcaataataatgaatttaccgtgttggaagccacaggaatcttta
agaaacttcctcaattacgtaaaataaactttagcaacaataagatcacagatattgaggagggagcatttgaaggagcatctggtgtaaatgaaatac
ttcttacgagtaatcgtttggaaaatgtgcagcataagatgttcaagggattggaaagcctaaaactttgatgttgagaagcaatcgaataacctgtgt
ggggaatgacagtttcataggactcagttctgtgcgtttgctttctttgtatgataatcaaattactacagttgcaccaggggcatttgatactctccattct
ttatctactctaaacctcttggccaatccttttaactgtaactgctacctggcttggttgggagagtggctgagaaagaagagaattgtcacgggaaatcc
tagatgtcaaaaaccatacttcctgaaagaaatacccatccaggatgtggccattcaggacttcacttgtgatgacggaaatgatgacaatagttgctc
cccactttctcgctgtcctactgaatgtacttgcttggatacagtcgtccgatgtagcaacaagggtttgaaggtcttgccgaaaggtattccaagagat
gtcacagagttgtatctggatggaaaccaatttacactggttcccaaggaactctccaactacaaacatttaacacttatagacttaagtaacaacagaa
taagcacgctttctaatcagagcttcagcaacatgacccagctcctcaccttaattcttagttacaaccgtctgagatgtattcctcctcgcacctttgatg
gattaaagtctcttcgattactttctctacatggaaatgacatttctgttgtgcctgaaggtgctttcaatgatctttctgcattatcacatctagcaattgg
agccaaccctctttactgtgattgtaacatgcagtggttatccgactgggtgaagtcggaatataaggagcctggaattgctcgttgtgctggtcctggaga
aatggcagataaacttttactcacaactccctccaaaaaatttacctgtcaaggtcctgtggatgtcaatattctagctaagtgtaacccctgcctatcaaa
tccgtgtaaaaatgatggcacatgtaatagtgatccagttgacttttaccgatgcacctgtccatatggtttcaaggggcaggactgtgatgtcccaattc
atgcctgcatcagtaacccatgtaaacatggaggaacttgccacttaaaggaaggagaagaagatggattctggtgtatttgtgctgatggatttgaag
gagaaaattgtgaagtcaacgttgatgattgtgaagataatgactgtgaaaataattctacatgtgtcgatggcattaataactacacatgcctttgccca
cctgagtatacaggtgagttgtgtgaggagaagctggacttctgtgcccaggacctgaacccctgccagcacgattcaaagtgcatcctaactccaa
agggattcaaatgtgactgcacaccagggtacgtaggtgaacactgcgacatcgattttgacgactgccaagacaacaagtgtaaaaacggagccc
actgcacagatgcagtgaacggctatacgtgcatatgccccgaaggttacagtggcttgttctgtgagttttctccacccatggtcctcccctcgtaccag
cccctgtgataattttgattgtcagaatggagctcagtgtatcgtcagaataaatgagccaatatgtcagtgtttgcctggctatcagggagaaaagtgt
gaaaaattggttagtgtgaattttataaacaaagagtcttatcttcagattccttcagccaaggttcggcctcagacgaacataacacttcagattgccac
agatgaagacagcggaatcctcctgtataagggtgacaaagaccatatcgcggtagaactctatcgggggcgtgttcgtgccagctatgacaccgg
ctctcatccagcttctgccatttacagtgtggagacaatcaatgatggaaacttccacattgtggaactacttgccttggatcagagtctctctttgtccgt
ggatggtgggaaccccaaaatcatcactaacttgtcaaagcagtccactctgaattttgactctccactctatgtaggaggcatgccagggaagagta
acgtggcatctctgcgccaggcccctgggcagaacggaaccagcttccacggctgcatccggaacctttacatcaacagtgagctgcaggacttcc
agaaggtgccgatgcaaacaggcattttgcctggctgtgagccatgccacaagaaggtgtgtgcccatggcacatgccagcccagcagccaggc
aggcttcacctgcgagtgccaggaaggatggatggggcccctctgtgaccaacggaccaatgacccttgccttggaaataaatgcgtacatggcac
ctgcttgcccatcaatgcgttctcctacagctgtaagtgcttggagggccatggaggtgtcctctgtgatgaagaggaggatctgtttaacccatgcca
ggcgatcaagtgcaagcacgggaagtgcaggctttcaggtctggggcagccctactgtgaatgcagcagtggatacacgggggacagctgtgat
cgagaaatctcttgtcgaggggaaaggataagagattattaccaaaagcagcagggctatgctgcttgccaaacaaccaagaaggtgtcccgatta
gagtgcagaggtgggtgtgcaggagggcagtgctgtggaccgctgaggagcaagcggcggaaatactctttcgaatgcactgacggctcctcctt
tgtggacgaggttgagaaagtggtgaagtgcggctgtacgaggtgtgtgtcctaaacacactcccggcagctctgtctttggaaaaggttgtatactt
cttgaccatgtgggactaatgaatgcttcatagtggaaatatttgaaatatattgtaaaatacagaacagacttatttttattatgagaataaagactttttt
tctgcatttg.

In another embodiment, the SLIT2 protein is encoded by a nucleic acid molecule having a sequence set forth in GenBank Accession No. NM_{—}004787. In another embodiment, the SLIT2 protein is encoded by a nucleic acid molecule having a sequence selected from those set forth in GenBank Accession No. AB017168 and AK027326. In another embodiment, the SLIT2 protein has an AA sequence set forth in 1 of the above GenBank entries. In another embodiment, the SLIT2 protein is encoded by any other SLIT2 gene sequence known in the art. In another embodiment, the SLIT2 protein is any other SLIT2 protein known in the art. In another embodiment, the TVM is an isoform of a SLIT2 protein. In another embodiment, the TVM is a homologue of a SLIT2 protein. In another embodiment, the TVM is a variant of a SLIT2 protein. In another embodiment, the TVM is a fragment of a SLIT2 protein. In another embodiment, the TVM is a fragment of an isoform, homologue, or variant of a SLIT2 protein. Each possibility represents another embodiment of the present invention.

[0272] In another embodiment, the TVM is SLC11A1 (Solute carrier family 11; proton-coupled divalent metal ion transporters, member 1; NRAMP). In another embodiment, the TVM is a nucleotide molecule encoding SLC11A1. In another embodiment, the TVM is an isoform of a SLC11A1 protein. In another embodiment, the TVM is a homologue of a SLC11A1 protein. In another embodiment, the TVM is a variant of a SLC11A1 protein. In another embodiment, the TVM is a fragment of a SLC11A1 protein. In another embodiment, the TVM is a fragment of an isoform, homologue, or variant of a SLC11A1 protein. Each possibility represents another embodiment of the present invention.

[0273] In another embodiment, the TVM is SEC23B. In another embodiment, the TVM is a nucleotide molecule encoding SEC23B. In another embodiment, the TVM is an isoform of a SEC23B protein. In another embodiment, the TVM is a homologue of a SEC23B protein. In another embodiment, the TVM is a variant of a SEC23B protein. In another embodiment, the TVM is a fragment of a SEC23B protein. In another embodiment, the TVM is a fragment of an isoform, homologue, or variant of a SEC23B protein. Each possibility represents another embodiment of the present invention.

[0274] In another embodiment, the TVM is DKFZp762E1312. In another embodiment, the TVM is a nucleotide molecule encoding DKFZp762E1312. In another embodiment, the TVM is an isoform of a DKFZp762E1312 protein. In another embodiment, the TVM is a homologue of a DKFZp762E1312 protein. In another embodiment, the TVM is a variant of a DKFZp762E1312 protein. In another embodiment, the TVM is a fragment of a DKFZp762E1312 protein. In another embodiment, the TVM is a fragment of an isoform, homologue, or variant of a DKFZp762E1312 protein. Each possibility represents another embodiment of the present invention.

[0275] In another embodiment, the TVM is KIAA1892. In another embodiment, the TVM is a nucleotide molecule encoding KIAA1892. In another embodiment, the TVM is a protein encoded by KIAA1892. In another embodiment, the TVM is an isoform of a KIAA1892 protein. In another embodiment, the TVM is a homologue of a KIAA1892 protein. In another embodiment, the TVM is a variant of a KIAA1892 protein. In another embodiment, the TVM is a fragment of a KIAA1892 protein. In another embodiment, the TVM is a fragment of an isoform, homologue, or variant of a KIAA1892 protein. Each possibility represents another embodiment of the present invention.

[0276] In another embodiment, the TVM is MS4A6A (Membrane-spanning 4-domains, subfamily A, member 6A). In another embodiment, the TVM is a nucleotide molecule encoding MS4A6A. In another embodiment, the TVM is an isoform of a MS4A6A protein. In another embodiment, the TVM is a homologue of a MS4A6A protein. In another embodiment, the TVM is a variant of a MS4A6A protein. In another embodiment, the TVM is a fragment of a MS4A6A protein. In another embodiment, the TVM is a fragment of an isoform, homologue, or variant of a MS4A6A protein. Each possibility represents another embodiment of the present invention.

[0277] In another embodiment, the TVM is KCNE3 (Potassium voltage-gated channel, Isk-related family, member 3). In another embodiment, the TVM is a nucleotide molecule encoding KCNE3. In another embodiment, the TVM is an isoform of a KCNE3 protein. In another embodiment, the TVM is a homologue of a KCNE3 protein. In another embodiment, the TVM is a variant of a KCNE3 protein. In another embodiment, the TVM is a fragment of a KCNE3 protein. In another embodiment, the TVM is a fragment of an isoform, homologue, or variant of a KCNE3 protein. Each possibility represents another embodiment of the present invention.

[0278] In another embodiment, the TVM is KCNE4 (Potassium voltage-gated channel, Isk-related family, member 4). In another embodiment, the TVM is a nucleotide molecule encoding KCNE4. In another embodiment, the TVM is an isoform of a KCNE4 protein. In another embodiment, the TVM is a homologue of a KCNE4 protein. In another embodiment, the TVM is a variant of a KCNE4 protein. In another embodiment, the TVM is a fragment of a KCNE4 protein. In another embodiment, the TVM is a fragment of an isoform, homologue, or variant of a KCNE4 protein. Each possibility represents another embodiment of the present invention.

[0279] In another embodiment, the TVM is SDC1 (Syndecan 1). In another embodiment, the TVM is a nucleotide molecule encoding SDC1. In another embodiment, the TVM is an isoform of a SDC1 protein. In another embodiment, the TVM is a homologue of a SDC1 protein. In another embodiment, the TVM is a variant of a SDC1 protein. In another embodiment, the TVM is a fragment of a SDC1 protein. In another embodiment, the TVM is a fragment of an isoform, homologue, or variant of a SDC1 protein. Each possibility represents another embodiment of the present invention.

[0280] In another embodiment, the TVM is ST14 (Suppression of tumorigenicity 14 (colon carcinoma)). In another embodiment, the TVM is a nucleotide molecule encoding ST14. In another embodiment, the TVM is an isoform of a ST14 protein. In another embodiment, the TVM is a homologue of a ST14 protein. In another embodiment, the TVM is a variant of a ST14 protein. In another embodiment, the TVM is a fragment of a ST14 protein. In another embodiment, the TVM is a fragment of an isoform, homologue, or variant of a ST14 protein. Each possibility represents another embodiment of the present invention.

[0281] In another embodiment, the TVM is CDCP1 (CUB domain containing protein 1). In another embodiment, the TVM is a nucleotide molecule encoding CDCP1. In another embodiment, the CDCP1 nucleotide is a short isoform of CDCP1. In another embodiment, the CDCP1 nucleotide is a long isoform of CDCP1. In another embodiment, the CDCP1 protein is encoded by a nucleic acid molecule having the sequence:

(SEQ ID No: 119)

gggcggggctcgggccggtccgcccgcgcgcaggtgagtgagccagggcggagcgcagctgcgccgggcttgggcgcctgggg
ccgccgctccccaccgtcgttttccccaccgaggccgaggcgtcccggagtcatggccggcctgaactgcggggtctctatcgcactgctagggg
ttctgctgctgggtgcggcgcgcctgccgcgcggggcagaagcttttgagattgctctgccacgagaaagcaacattacagttctcataaagctggg
gaccccgactctgctggcaaaaccctgttacatcgtcatttctaaaagacatataaccatgttgtccatcaagtctggagaaagaatagtctttaccttta
gctgccagagtcctgagaatcactttgtcatagagatccagaaaaatattgactgtatgtcaggcccatgtccttttggggaggttcagcttcagccctc
gacatcgttgttgcctaccctcaacagaactttcatctgggatgtcaaagctcataagagcatcggtttagagctgcagttttccatccctcgcctgagg
cagatcggtccgggtgagagctgcccagacggagtcactcactccatcagcggccgaatcgatgccaccgtggtcaggatcggaaccttctgcag
caatggcactgtgtcccggatcaagatgcaagaaggagtgaaaatggccttacacctcccatggttccaccccagaaatgtctccggcttcagcatt
gcaaaccgctcatctataaaacgtctgtgcatcatcgagtctgtgtttgagggtgaaggctcagcaaccctgatgtctgccaactacccagaaggcttc
cctgaggatgagctcatgacgtggcagtttgtcgttcctgcacacctgcgggccagcgtctccttcctcaacttcaacctctccaactgtgagaggaa
ggaggagcgggttgaatactacatcccgggctccaccaccaaccccgaggtgttcaagctggaggacaagcagcctgggaacatggcggggaa
cttcaacctctctctgcaaggctgtgaccaagatgcccaaagtccagggatcctccggctgcagttccaagttttggtccaacatccacaaaatgaaa
gcagtgagtgagccccactttcctttttcttcctcctccagcaccttcgttgtttcctgggtagtctgcctgggtgaggctcccttcctgtttctcatctgtg
gcttctgaaacacttagactctggacccagcaagagtttcaggaagtgggttgctaggcagttagacaggcttgttggtgaacacccggtatgtagttcc
atttcagcacaataaaaagaaatcttgcattcaaaaaaaaaaaaaaaaaaa.

In another embodiment, the CDCP1 protein is encoded by a nucleic acid molecule with a sequence set forth in SEQ ID No: 268. In another embodiment, the CDCP1 protein is a short isoform of CDCP1. In another embodiment, the CDCP1 protein is a long isoform of CDCP1. In another embodiment, the CDCP1 protein is encoded by a nucleic acid molecule having a sequence set forth in GenBank Accession No. AK026329. In another embodiment, the sequence of the CDCP1-encoding nucleotide is set forth in GenBank Accession No. NM_{—}178181. In another embodiment, the sequence of the CDCP1-encoding nucleotide is set forth in GenBank Accession No. BC021099. In another embodiment, the sequence of the CDCP1-encoding nucleotide is set forth in GenBank Accession No. BC069254. In another embodiment, the sequence of the CDCP1-encoding nucleotide is set forth in GenBank Accession No. AY026461. In another embodiment, the sequence of the CDCP1-encoding nucleotide is set forth in GenBank Accession No. AF468010. In another embodiment, the sequence of the CDCP1-encoding nucleotide is set forth in GenBank Accession No. AY167484. In another embodiment, the CDCP1 protein has an AA sequence set forth in 1 of the above GenBank entries. In another embodiment, the CDCP1 protein is encoded by any other CDCP1 gene sequence known in the art. In another embodiment, the CDCP1 protein is any other CDCP1 protein known in the art. In another embodiment, the TVM is an isoform of a CDCP1 protein. In another embodiment, the TVM is a homologue of a CDCP1 protein. In another embodiment, the TVM is a variant of a CDCP1 protein. In another embodiment, the TVM is a fragment of a CDCP1 protein. In another embodiment, the TVM is a fragment of an isoform, homologue, or variant of a CDCP1 protein. Each possibility represents another embodiment of the present invention.

[0282] In another embodiment, the TVM is a homologue of a CDCP1 protein. In another embodiment, the TVM is a variant of a CDCP1 protein. In another embodiment, the TVM is a fragment of a CDCP1 protein. In another embodiment, the TVM is a fragment of an isoform, homologue, or variant of a CDCP1 protein. Each possibility represents another embodiment of the present invention.

[0283] In another embodiment, the TVM is MOBK1B (C2orf6; MOB1, Mps One Binder kinase activator-like 1B). In another embodiment, the TVM is an isoform of a MOBK1B protein. In another embodiment, the TVM is a homologue of a MOBK1B protein. In another embodiment, the TVM is a variant of a MOBK1B protein. In another embodiment, the TVM is a fragment of a MOBK1B protein. In another embodiment, the TVM is a fragment of an isoform, homologue, or variant of a MOBK1B protein. Each possibility represents another embodiment of the present invention.

[0284] In another embodiment, the TVM is a protein encoded by C14orf28. In another embodiment, the TVM is C14orf28. In another embodiment, the TVM is a nucleotide molecule encoding a protein encoded by C14orf28. In another embodiment, the TVM is an isoform of a C14orf28 protein. In another embodiment, the TVM is a homologue of a C14orf28 protein. In another embodiment, the TVM is a variant of a C14orf28 protein. In another embodiment, the TVM is a fragment of a C14orf28 protein. In another embodiment, the TVM is a fragment of an isoform, homologue, or variant of a C14orf28 protein. Each possibility represents another embodiment of the present invention.

[0285] In another embodiment, the TVM is PCDHB2 (Protocadherin beta 2). In another embodiment, the TVM is a nucleotide molecule encoding PCDHB2. In another embodiment, the TVM is an isoform of a PCDHB2 protein. In another embodiment, the TVM is a homologue of a PCDHB2 protein. In another embodiment, the TVM is a variant of a PCDHB2 protein. In another embodiment, the TVM is a fragment of a PCDHB2 protein. In another embodiment, the TVM is a fragment of an isoform, homologue, or variant of a PCDHB2 protein. Each possibility represents another embodiment of the present invention.

[0286] In another embodiment, the TVM is GPR105 (Purinergic receptor P2Y, G-protein coupled, 14). In another embodiment, the TVM is a nucleotide molecule encoding GPR105. In another embodiment, the TVM is an isoform of a GPR105 protein. In another embodiment, the TVM is a homologue of a GPR105 protein. In another embodiment, the TVM is a variant of a GPR105 protein. In another embodiment, the TVM is a fragment of a GPR105 protein. In another embodiment, the TVM is a fragment of an isoform, homologue, or variant of a GPR105 protein. Each possibility represents another embodiment of the present invention.

[0287] In another embodiment, the TVM is CSPG2 (chondroitin sulfate proteoglycan 2). In another embodiment, the TVM is a nucleotide molecule encoding CSPG2. In another embodiment, the TVM is an isoform of a CSPG2 protein. In another embodiment, the TVM is a homologue of a CSPG2 protein. In another embodiment, the TVM is a variant of a CSPG2 protein. In another embodiment, the TVM is a fragment of a CSPG2 protein. In another embodiment, the TVM is a fragment of an isoform, homologue, or variant of a CSPG2 protein. Each possibility represents another embodiment of the present invention.

[0288] In another embodiment, the TVM is ESM1 (Endothelial cell-specific molecule 1). In another embodiment, the TVM is a nucleotide molecule encoding ESM1. In another embodiment, the TVM is an isoform of a ESM1 protein. In another embodiment, the TVM is a homologue of a ESM1 protein. In another embodiment, the TVM is a variant of a ESM1 protein. In another embodiment, the TVM is a fragment of a ESM1 protein. In another embodiment, the TVM is a fragment of an isoform, homologue, or variant of a ESM1 protein. Each possibility represents another embodiment of the present invention.

[0289] In another embodiment, the TVM is WFDC2 (WAP four-disulfide core domain 2). In another embodiment, the TVM is a nucleotide molecule encoding WFDC2. In another embodiment, the TVM is an isoform of a WFDC2 protein. In another embodiment, the TVM is a homologue of a WFDC2 protein. In another embodiment, the TVM is a variant of a WFDC2 protein. In another embodiment, the TVM is a fragment of a WFDC2 protein. In another embodiment, the TVM is a fragment of an isoform, homologue, or variant of a WFDC2 protein. Each possibility represents another embodiment of the present invention.

[0290] In another embodiment, the TVM is SPP1 (Secreted phosphoprotein 1 (osteopontin, bone sialoprotein I, early T-lymphocyte activation 1)). In another embodiment, the TVM is a nucleotide molecule encoding SPP1. In another embodiment, the TVM is an isoform of a SPP1 protein. In another embodiment, the TVM is a homologue of a SPP1 protein. In another embodiment, the TVM is a variant of a SPP1 protein. In another embodiment, the TVM is a fragment of a SPP1 protein. In another embodiment, the TVM is a fragment of an isoform, homologue, or variant of a SPP1 protein. Each possibility represents another embodiment of the present invention.

[0291] In another embodiment, the TVM is a TM protein listed in FIG. 11. In another embodiment, the TVM is MGAT4A. In another embodiment, the TVM is a nucleotide molecule encoding MGAT4A. In another embodiment, the TVM is AFAP. In another embodiment, the TVM is a nucleotide molecule encoding AFAP. In another embodiment, the TVM is CXCR4. In another embodiment, the TVM is a nucleotide molecule encoding CXCR4. In another embodiment, the TVM is UCP2. In another embodiment, the TVM is a nucleotide molecule encoding UCP2. In another embodiment, the TVM is TWIST. In another embodiment, the TVM is a nucleotide molecule encoding TWIST. In another embodiment, the TVM is SLC2A3. In another embodiment, the TVM is a nucleotide molecule encoding SLC2A3. In another embodiment, the TVM is MYO1B. In another embodiment, the TVM is a nucleotide molecule encoding MYO1B. In another embodiment, the TVM is COL4A2. In another embodiment, the TVM is a nucleotide molecule encoding COL4A2. In another embodiment, the TVM is MGC4677. In another embodiment, the TVM is a nucleotide molecule encoding MGC4677. In another embodiment, the TVM is G1P2. In another embodiment, the TVM is a nucleotide molecule encoding G1P2. In another embodiment, the TVM is BHLHB3. In another embodiment, the TVM is a nucleotide molecule encoding BHLHB3. In another embodiment, the TVM is NEDL2. In another embodiment, the TVM is a nucleotide molecule encoding NEDL2. In another embodiment, the TVM is ITGA1. In another embodiment, the TVM is a nucleotide molecule encoding ITGA1. Each possibility represents a separate embodiment of the present invention.

[0292] In another embodiment, the TVM is a TM protein listed in FIG. 12. In another embodiment, the TVM is MUC16. In another embodiment, the TVM is a nucleotide molecule encoding MUC16. In another embodiment, the TVM is FLJ20171. In another embodiment, the TVM is a nucleotide molecule encoding FLJ20171. In another embodiment, the TVM is TAP1. In another embodiment, the TVM is a nucleotide molecule encoding TAP1. In another embodiment, the TVM is C11orf5. In another embodiment, the TVM is a nucleotide molecule encoding C11orf5. In another embodiment, the TVM is SLC30A5. In another embodiment, the TVM is a nucleotide molecule encoding SLC30A5. In another embodiment, the TVM is CST5. In another embodiment, the TVM is a nucleotide molecule encoding CST5. In another embodiment, the TVM is TNFAIP1. In another embodiment, the TVM is a nucleotide molecule encoding TNFAIP1. In another embodiment, the TVM is AKAP8. In another embodiment, the TVM is a nucleotide molecule encoding AKAP8. In another embodiment, the TVM is PSAT1. In another embodiment, the TVM is a nucleotide molecule encoding PSAT1. In another embodiment, the TVM is FLJ20171. In another embodiment, the TVM is a nucleotide molecule encoding FLJ20171. In another embodiment, the TVM is RP2. In another embodiment, the TVM is a nucleotide molecule encoding RP2. In another embodiment, the TVM is LOC132671. In another embodiment, the TVM is a nucleotide molecule encoding LOC132671. In another embodiment, the TVM is HES2. In another embodiment, the TVM is a nucleotide molecule encoding HES2. In another embodiment, the TVM is APCDD1. In another embodiment, the TVM is a nucleotide molecule encoding APCDD1. In another embodiment, the TVM is LOC286334. In another embodiment, the TVM is a nucleotide molecule encoding LOC286334. In another embodiment, the TVM is FLJ11526. In another embodiment, the TVM is a nucleotide molecule encoding FLJ11526. In another embodiment, the TVM is KIAA2022. In another embodiment, the TVM is a nucleotide molecule encoding KIAA2022. In another embodiment, the TVM is MGC3032. In another embodiment, the TVM is a nucleotide molecule encoding MGC3032. In another embodiment, the TVM is FLJ22795. In another embodiment, the TVM is a nucleotide molecule encoding FLJ22795. In another embodiment, the TVM is KIAA1909. In another embodiment, the TVM is a nucleotide molecule encoding KIAA1909. In another embodiment, the TVM is FLJ30277. In another embodiment, the TVM is a nucleotide molecule encoding FLJ30277. In another embodiment, the TVM is LOC284801. In another embodiment, the TVM is a nucleotide molecule encoding LOC284801. In another embodiment, the TVM is LOC158135. In another embodiment, the TVM is a nucleotide molecule encoding LOC158135. In another embodiment, the TVM is LOC254531. In another embodiment, the TVM is a nucleotide molecule encoding LOC254531. In another embodiment, the TVM is OR7E47P. In another embodiment, the TVM is a nucleotide molecule encoding OR7E47P. In another embodiment, the TVM is UBPH. In another embodiment, the TVM is a nucleotide molecule encoding UBPH. In another embodiment, the TVM is FLJ35801. In another embodiment, the TVM is a nucleotide molecule encoding FLJ35801. In another embodiment, the TVM is LOC150271. In another embodiment, the TVM is a nucleotide molecule encoding LOC150271. In another embodiment, the TVM is SIPA1 L3. In another embodiment, the TVM is a nucleotide molecule encoding SIPA1L3. In another embodiment, the TVM is LOC158563. In another embodiment, the TVM is a nucleotide molecule encoding LOC158563. In another embodiment, the TVM is NAV1. In another embodiment, the TVM is a nucleotide molecule encoding NAV1. In another embodiment, the TVM is LOC401022. In another embodiment, the TVM is a nucleotide molecule encoding LOC401022. In another embodiment, the TVM is C9orf113. In another embodiment, the TVM is a nucleotide molecule encoding C9orf113. In another embodiment, the TVM is GPT2. In another embodiment, the TVM is a nucleotide molecule encoding GPT2. In another embodiment, the TVM is PHLDB1. In another embodiment, the TVM is a nucleotide molecule encoding PHLDB1. In another embodiment, the TVM is FLJ12748. In another embodiment, the TVM is a nucleotide molecule encoding FLJ12748. In another embodiment, the TVM is LOC130355. In another embodiment, the TVM is a nucleotide molecule encoding LOC130355. In another embodiment, the TVM is BECN1. In another embodiment, the TVM is a nucleotide molecule encoding BECN1. In another embodiment, the TVM is LOC283713. In another embodiment, the TVM is a nucleotide molecule encoding LOC283713. Each possibility represents a separate embodiment of the present invention.

[0293] In another embodiment, the TVM is a TM protein listed in Table 6. In another embodiment, the TVM is a TM protein listed in Table 7. In another embodiment, the TVM is a plasma-membrane-associated (PM) protein listed in Table 6. In another embodiment, the TVM is a PM protein listed in Table 7. In another embodiment, a PM protein of the present invention is a TM protein. In another embodiment, the PM protein is associated with the intracellular face of the PM. In another embodiment, the PM protein is associated with the extracellular face of the PM. Each possibility represents a separate embodiment of the present invention.

[0294] In another embodiment, the TVM is FAD104 (FNDC3B; Fibronectin type III domain containing 3B). In another embodiment, the TVM is a nucleotide molecule encoding FAD104. In another embodiment, the TVM is WARP (Von Willebrand factor A domain containing 1). In another embodiment, the TVM is a nucleotide molecule encoding WARP. In another embodiment, the TVM is B-cell receptor-associated protein 29 (BCAP29). In another embodiment, the TVM is a nucleotide molecule encoding BCAP29. In another embodiment, the TVM is CDH1 (Cadherin 1, type 1, E-cadherin (epithelial). In another embodiment, the TVM is a nucleotide molecule encoding CDH1. In another embodiment, the TVM is FLJ0826 (OGFOD1; 2-oxoglutarate and iron-dependent oxygenase domain containing 1). In another embodiment, the TVM is a nucleotide molecule encoding FLJ0826. In another embodiment, the TVM is OPN3 (Opsin 3; encephalopsin, panopsin). In another embodiment, the TVM is a nucleotide molecule encoding OPN3. In another embodiment, the TVM is HIATL2 (Hippocampus abundant gene transcript-like 2). In another embodiment, the TVM is a nucleotide molecule encoding HIATL2. In another embodiment, the TVM is IL28RA (Interleukin 28 receptor, alpha; interferon, lambda receptor). In another embodiment, the TVM is a nucleotide molecule encoding IL28RA. In another embodiment, the TVM is TMEM19 (Transmembrane protein 19). In another embodiment, the TVM is a nucleotide molecule encoding TMEM19. In another embodiment, the TVM is C10orf69 (SPFH domain family, member 1). In another embodiment, the TVM is a nucleotide molecule encoding C10orf69. In another embodiment, the TVM is FRAP1 (FK506 binding protein 12-rapamycin associated protein 1). In another embodiment, the TVM is a nucleotide molecule encoding FRAP1. In another embodiment, the TVM is CKLFSF6 (CKLF-like MARVEL transmembrane domain containing 6). In another embodiment, the TVM is a nucleotide molecule encoding CKLFSF6. In another embodiment, the TVM is MPHOSPH9 (M-phase phosphoprotein 9). In another embodiment, the TVM is a nucleotide molecule encoding MPOHSPH9. In another embodiment, the TVM is CLST11240 (HIGD1B; HIG1 domain family, member 1B). In another embodiment, the TVM is a nucleotide molecule encoding CLST11240. In another embodiment, the TVM is SGPP2 (Sphingosine-1-phosphate phosphotase 2). In another embodiment, the TVM is a nucleotide molecule encoding SGPP2. In another embodiment, the TVM is SLC03A1 (Solute carrier organic anion transporter family, member 3A1). In another embodiment, the TVM is a nucleotide molecule encoding SLCO3A1. In another embodiment, the TVM is LOC51136 (PTD016 protein). In another embodiment, the TVM is a nucleotide molecule encoding LOC51136. In another embodiment, the TVM is DKFZp564I1922 (MXRA5 (Matrix-remodelling associated 5). In another embodiment, the TVM is a nucleotide molecule encoding DKFZp564I1922. In another embodiment, the TVM is CALM3 (Calmodulin 3; phosphorylase kinase, delta). In another embodiment, the TVM is a nucleotide molecule encoding CALM3. In another embodiment, the TVM is MGC34647. In another embodiment, the TVM is a nucleotide molecule encoding MGC34647. In another embodiment, the TVM is MUC1 (Mucin 1, transmembrane). In another embodiment, the TVM is a nucleotide molecule encoding MUC1. In another embodiment, the TVM is SLC30A6 (Solute carrier family 30 (zinc transporter), member 6). In another embodiment, the TVM is a nucleotide molecule encoding SLC30A6. In another embodiment, the TVM is TLCD1 (LOC116238). In another embodiment, the TVM is a nucleotide molecule encoding TLCD1. In another embodiment, the TVM is SPTB (Spectrin, beta, erythrocytic (includes spherocytosis, clinical type I)). In another embodiment, the TVM is a nucleotide molecule encoding SPTB. In another embodiment, the TVM is FNDC3 (Fibronectin type III domain containing 3A). In another embodiment, the TVM is a nucleotide molecule encoding FNDC3. In another embodiment, the TVM is SPRY1 (Sprouty homolog 1, antagonist of FGF signaling (Drosophila). In another embodiment, the TVM is a nucleotide molecule encoding SPRY1. In another embodiment, the TVM is MME (Membrane metallo-endopeptidase; neutral endopeptidase, enkephalinase, CALLA, CD10). In another embodiment, the TVM is a nucleotide molecule encoding MME. In another embodiment, the TVM is INSR (Insulin receptor). In another embodiment, the TVM is a nucleotide molecule encoding INSR. In another embodiment, the TVM is LPPR4 (Plasticity related gene 1). In another embodiment, the TVM is a nucleotide molecule encoding LPPR1. In another embodiment, the TVM is a C14orf100-encoded protein. In another embodiment, the TVM is a nucleotide molecule encoding a C14orf100-encoded protein. In another embodiment, the TVM is a C14orf100 nucleotide molecule. In another embodiment, the TVM is SLC9A5 (Solute carrier family 9 (sodium/hydrogen exchanger), member 5). In another embodiment, the TVM is a nucleotide molecule encoding SLC9A5. In another embodiment, the TVM is SCGB2A1 (Secretoglobin, family 2A, member 1). In another embodiment, the TVM is a nucleotide molecule encoding SCGB2A1. In another embodiment, the TVM is FLT1 (Fms-related tyrosine kinase 1 (vascular endothelial growth factor/vascular permeability factor receptor). In another embodiment, the TVM is a nucleotide molecule encoding FLT1. In another embodiment, the TVM is a nucleotide molecule encoding MOBK1B. In another embodiment, the TVM is TMEM2 (Transmembrane protein 2). In another embodiment, the TVM is a nucleotide molecule encoding TMEM2. In another embodiment, the TVM is TMEM8 (Transmembrane protein 8; five membrane-spanning domains). In another embodiment, the TVM is a nucleotide molecule encoding TMEM8. In another embodiment, the TVM is SLC5A4 (Solute carrier family 5 (low affinity glucose cotransporter), member 4). In another embodiment, the TVM is a nucleotide molecule encoding SLC5A4. In another embodiment, the TVM is MEST (Mesoderm specific transcript homolog (mouse). In another embodiment, the TVM is a nucleotide molecule encoding MEST. In another embodiment, the TVM is CHODL (Chondrolectin). In another embodiment, the TVM is a nucleotide molecule encoding CHODL. In another embodiment, the TVM is TRIO (Triple functional domain (PTPRF interacting)). In another embodiment, the TVM is a nucleotide molecule encoding TRIO. In another embodiment, the TVM is IL10RA (Interleukin 10 receptor, alpha). In another embodiment, the TVM is a nucleotide molecule encoding IL10RA. In another embodiment, the TVM is LGALS3BP (Lectin, galactoside-binding, soluble, 3 binding protein). In another embodiment, the TVM is a nucleotide molecule encoding LGALS3BP. In another embodiment, the TVM is STK4 (Serine/threonine kinase 4). In another embodiment, the TVM is a nucleotide molecule encoding STK4. In another embodiment, the TVM is ERBB3 (V-erb-b2 erythroblastic leukemia viral oncogene homolog 3 (avian). In another embodiment, the TVM is a nucleotide molecule encoding ERBB3. In another embodiment, the TVM is KIAA1024. In another embodiment, the TVM is a nucleotide molecule encoding KIAA1024. In another embodiment, the TVM is KIAA1906. In another embodiment, the TVM is a nucleotide molecule encoding KIAA1906. In another embodiment, the TVM is F3 (Coagulation factor III (thromboplastin, tissue factor)). In another embodiment, the TVM is a nucleotide molecule encoding F3. In another embodiment, the TVM is KIAA0703. In another embodiment, the TVM is a nucleotide molecule encoding KIAA0703. In another embodiment, the TVM is C1orf10 (CRNN; Cornulin). In another embodiment, the TVM is a nucleotide molecule encoding C1orf10. In another embodiment, the TVM is POLYDOM (SVEP1 (Sushi, von Willebrand factor type A, EGF and pentraxin domain containing 1). In another embodiment, the TVM is a nucleotide molecule encoding POLYDOM. In another embodiment, the TVM is TUBAL3 (Tubulin, alpha-like 3). In another embodiment, the TVM is a nucleotide molecule encoding TUBAL3. In another embodiment, the TVM is IL7R (Interleukin 7 receptor). In another embodiment, the TVM is a nucleotide molecule encoding IL7R. In another embodiment, the TVM is ARHGAP18 (Rho GTPase activating protein 18). In another embodiment, the TVM is a nucleotide molecule encoding ARHGAP18. In another embodiment, the TVM is GRM1 (Glutamate receptor, metabotropic 1). In another embodiment, the TVM is a nucleotide molecule encoding GRM1. In another embodiment, the TVM is PREX1 (Phosphatidyl-inositol 3,4,5-trisphosphate-dependent RAC exchanger 1). In another embodiment, the TVM is a nucleotide molecule encoding PREX1. In another embodiment, the TVM is MUC3A (Mucin 3A, intestinal). In another embodiment, the TVM is a nucleotide molecule encoding MUC3A. In another embodiment, the TVM is EPSTI1 (Epithelial stromal interaction 1 (breast)). In another embodiment, the TVM is a nucleotide molecule encoding EPSTI1. In another embodiment, the TVM is UBE2J1 (Ubiquitin-conjugating enzyme E2, J1 (UBC6 homolog, yeast). In another embodiment, the TVM is a nucleotide molecule encoding UBE2J1. Each possibility represents a separate embodiment of the present invention.

[0295] As provided herein, the long isoform of ADAM12 was particularly efficacious, under the conditions utilized, in distinguishing between tumor vasculature and healthy tissue (Example 20). In another embodiment, the ADAM12 nucleotide of methods and compositions of the present invention is a long isoform thereof. In another embodiment, the ADAM12 nucleotide is a short isoform. In another embodiment, the ADAM12 nucleotide is any other ADAM12 nucleotide known in the art. Each possibility represents a separate embodiment of the present invention.

[0296] An ADAM12 protein of methods and compositions of the present invention is, in another embodiment, a long isoform thereof. In another embodiment, the ADAM12 protein is a short isoform In another embodiment, the ADAM12 protein is any other ADAM12 protein known in the art. Each possibility represents a separate embodiment of the present invention.

[0297] As provided herein, the short isoform of CDCP1-CUB was particularly efficacious, under the conditions utilized, in distinguishing between tumor vasculature and healthy tissue (Example 20). In another embodiment, the CDCP1-CUB nucleotide of methods and compositions of the present invention is a short isoform thereof. In another embodiment, the CDCP1-CUB nucleotide is a long isoform. In another embodiment, the CDCP1-CUB nucleotide is any other CDCP1-CUB nucleotide known in the art. Each possibility represents a separate embodiment of the present invention.

[0298] A CDCP1-CUB protein of methods and compositions of the present invention is, in another embodiment, a short isoform thereof. In another embodiment, the CDCP1-CUB protein is a long isoform. In another embodiment, the CDCP1-CUB-protein is any other CDCP1-CUB protein known in the art. Each possibility represents a separate embodiment of the present invention.

[0299] The cancer treated by a method of present invention is, in another embodiment, a cervical cancer tumor. In another embodiment, the cancer is a head and neck cancer tumor. In another embodiment, the cancer is a breast cancer tumor. In another embodiment, the cancer is an ano-genital cancer tumor. In another embodiment, the cancer is a melanoma. In another embodiment, the cancer is a sarcoma. In another embodiment, the cancer is a carcinoma. In another embodiment, the cancer is a lymphoma. In another embodiment, the cancer is a leukemia. In another embodiment, the cancer is mesothelioma. In another embodiment, the cancer is a glioma. In another embodiment, the cancer is a germ cell tumor. In another embodiment, the cancer is a choriocarcinoma. In another embodiment, the cancer is pancreatic cancer. In another embodiment, the cancer is ovarian cancer. In another embodiment, the cancer is gastric cancer. In another embodiment, the cancer is a carcinomatous lesion of the pancreas. In another embodiment, the cancer is pulmonary adenocarcinoma. In another embodiment, the cancer is colorectal adenocarcinoma. In another embodiment, the cancer is pulmonary squamous adenocarcinoma. In another embodiment, the cancer is gastric adenocarcinoma. In another embodiment, the cancer is an ovarian surface epithelial neoplasm (e.g. a benign, proliferative or malignant variety thereof). In another embodiment, the cancer is an oral squamous cell carcinoma. In another embodiment, the cancer is non small-cell lung carcinoma. In another embodiment, the cancer is an endometrial carcinoma. In another embodiment, the cancer is a bladder cancer. In another embodiment, the cancer is a head and neck cancer. In another embodiment, the cancer is a prostate carcinoma. In another embodiment, the cancer is an acute myelogenous leukemia (AML). In another embodiment, the cancer is a myelodysplastic syndrome (MDS). In another embodiment, the cancer is a non-small cell lung cancer (NSCLC). In another embodiment, the cancer is a Wilms' tumor. In another embodiment, the cancer is a leukemia. In another embodiment, the cancer is a lymphoma. In another embodiment, the cancer is a desmoplastic small round cell tumor. In another embodiment, the cancer is a mesothelioma (e.g. malignant mesothelioma). In another embodiment, the cancer is a gastric cancer. In another embodiment, the cancer is a colon cancer. In another embodiment, the cancer is a lung cancer. In another embodiment, the cancer is a breast cancer. In another embodiment, the cancer is a germ cell tumor. In another embodiment, the cancer is an ovarian cancer. In another embodiment, the cancer is a uterine cancer. In another embodiment, the cancer is a thyroid cancer. In another embodiment, the cancer is a hepatocellular carcinoma. In another embodiment, the cancer is a thyroid cancer. In another embodiment, the cancer is a liver cancer. In another embodiment, the cancer is a renal cancer. In another embodiment, the cancer is a kaposis. In another embodiment, the cancer is a sarcoma. In another embodiment, the cancer is another carcinoma or sarcoma. Each possibility represents a separate embodiment of the present invention.

[0300] In another embodiment of methods and compositions of the present invention, a subject is contacted with a nucleotide molecule, antibody, ligand, or composition utilized in a method of the present invention. In another embodiment, a solid tumor is contacted with the nucleotide molecule, antibody, ligand, or composition. In another embodiment, an ovarian tumor is contacted with the nucleotide molecule, antibody, ligand, or composition. In another embodiment, a breast cancer tumor is contacted with the nucleotide molecule, antibody, ligand, or composition. In another embodiment, a renal tumor is contacted with the nucleotide molecule, antibody, ligand, or composition. In another embodiment, any other type of solid tumor known in the art is contacted with the nucleotide molecule, antibody, ligand, or composition. Each possibility represents a separate embodiment of the present invention.

[0301] In another embodiment, a transmembrane (TM) protein of the present invention is accessible to antibodies and/or non-cell membrane-permeable agents and ligands. In another embodiment, a plasma membrane-associated protein of the present invention is accessible to antibodies and/or non-cell membrane-permeable agents and ligands. In another embodiment, a plasma membrane-associated protein of the present invention is a TM protein. In another embodiment, the plasma membrane-associated protein is an extracellular peripheral membrane protein. In another embodiment, the plasma membrane-associated protein is an intracellular peripheral membrane protein. Each possibility represents a separate embodiment of the present invention.

[0302] In another embodiment, a TVM of the present invention is specific for vasculogenesis. In another embodiment, a TVM is associated with vasculogenesis. “Vasculogenesis” refers, in another embodiment, to recruitment of endothelial progenitors of hematopoietic origin.” In another embodiment, the term refers to de novo formation of tumor vasculature. In another embodiment, a method of present invention is capable to detecting or localizing vasculogenesis. In another embodiment, a method of present invention is capable to inhibiting vasculogenesis. Each possibility represents a separate embodiment of the present invention.

[0303] In another embodiment, the TVM is a secreted protein. In another embodiment, the TVM is an extracellular matrix (ECM) protein. In another embodiment, the TVM is a protein associated with the plasma membrane of the TVC, on the extracellular side. In another embodiment, the TVM is capable of shedding from the shed into a bodily fluid. In another embodiment, the TVM can be detected in a bodily fluid. In another embodiment, the bodily fluid is blood. In another embodiment, the bodily fluid is lymph. In another embodiment, the bodily fluid is saliva. In another embodiment, the bodily fluid is sperm. In another embodiment, the bodily fluid is cerebro-spinal fluid. In another embodiment, the bodily fluid is cervico-vaginal fluid. In another embodiment, the bodily fluid is any other bodily fluid known in the art. Each possibility represents a separate embodiment of the present invention.

[0304] In another embodiment, the TVM is IBSP (Integrin-binding sialoprotein). In another embodiment, the TVM is a nucleotide molecule encoding IBSP. In another embodiment, the TVM is CKLFSF6 (CKLF-like MARVEL transmembrane domain containing 6). In another embodiment, the TVM is a nucleotide molecule encoding CKLFSF6. In another embodiment, the TVM is HAPLN1 (Hyaluronan and proteoglycan link protein 1). In another embodiment, the TVM is a nucleotide molecule encoding HAPLN1. In another embodiment, the TVM is FLT1 (Fms-related tyrosine kinase 1 (vascular endothelial growth factor/vascular permeability factor receptor). In another embodiment, the TVM is a nucleotide molecule encoding FLT1. In another embodiment, the TVM is LGALS3BP (Lectin, galactoside-binding, soluble, 3 binding protein). In another embodiment, the TVM is a nucleotide molecule encoding LGALS3BP. In another embodiment, the TVM is CCL15 (chemokine (C-C motif) ligand 15). In another embodiment, the TVM is a nucleotide molecule encoding CCL15. In another embodiment, the TVM is PLA2G2D (Phospholipase A2, group IID). In another embodiment, the TVM is a nucleotide molecule encoding PLA2G2D. In another embodiment, the TVM is MUC3A (Mucin 3A, intestinal). In another embodiment, the TVM is a nucleotide molecule encoding MUC3A. In another embodiment, the TVM is LTBP2 (Latent transforming growth factor beta binding protein 2). In another embodiment, the TVM is a nucleotide molecule encoding LTBP2. In another embodiment, the TVM is CELSR2 (Cadherin, EGF LAG seven-pass G-type receptor 2). In another embodiment, the TVM is a nucleotide molecule encoding CELSR2. Each possibility represents a separate embodiment of the present invention.

[0305] In another embodiment, the TVM is another nucleotide molecule listed in FIG. 8. In another embodiment, the TVM is a protein encoded by a nucleotide molecule listed in FIG. 8. Each possibility represents a separate embodiment of the present invention.

[0306] In another embodiment, the TVM is a solute carrier (SLC) family protein. As provided herein, several SLC proteins (SLC9A5, SLC30A6, SLC11A1) were identified as TVM, showing that proteins belonging to this family are efficacious TVM.

[0307] In another embodiment, the TVM is a TMEM protein. In another embodiment, the TVM is a protein containing a TMEM region of homology. In another embodiment, the TVM is a protein containing a TMEM domain. As provided herein, several TMEM proteins (TMEM8, TMEM2, TMEM19) were identified as TVM, showing that proteins belonging to this family are efficacious TVM.

[0308] In another embodiment, the TVM is a KCN family protein. As provided herein, several KCN proteins (KCNE3, KCNE4) were identified as TVM, showing that proteins belonging to this family are efficacious TVM.

[0309] In another embodiment, the TVM is a CD74 protein. As provided herein, CD74 is a marker of tumor vasculature.

[0310] In another embodiment, the TVM is an SYCP1 (Synaptonemal complex protein 1).

[0311] In another embodiment, the TVM is a CTD (carboxy-terminal domain, RNA polymerase II, polypeptide A) small phosphatase 1.

[0312] Each of TVM disclosed herein, refers, in another embodiment, to a human TVM. In another embodiment, certain TVM are homologues of proteins known by a different name in another species, as indicated herein.

[0313] Each TVM, nucleic acid molecule, and protein represents a separate embodiment of the present invention.

[0314] In another embodiment, the TVM of the present invention exhibit the advantage over tumor cell markers that TVC are genetically stable, relative to tumor cells; thus, TVC are much less likely to switch their expression of the TVM, thus evading localization, detection and therapeutic methods of the present invention. In another embodiment, the TVM of the present invention exhibit the advantage that tumor vasculature is significantly different than physiologic vasculature (for example, as demonstrated herein in Example 3). In another embodiment, the TVM of the present invention exhibit the advantage over tumor cell markers that TVC are more accessible via the bloodstream, relative to tumor cells; thus, TVC are more accessible for localization, detection and anti-tumor therapy by methods of the present invention. In another embodiment, a ligand that binds a TVM of the present invention is administered to a subject via the bloodstream. In another embodiment, the TVM of the present invention exhibit the advantage over tumor cell markers that the TVM are expressed on early-as well as late stage tumors. Each possibility represents a separate embodiment of the present invention.

[0315] In another embodiment, the therapeutic methods of the present invention exhibit the advantage that they can target any tumors above 2-3 mm in size, as tumors require vascularization to grow beyond this size. In another embodiment, the diagnostic methods of the present invention exhibit the advantage that they can target any tumors above 2-3 mm in size, as tumors require vascularization to grow beyond this size; thus, these methods enable early detection of solid tumors. In another embodiment, the localization methods of the present invention exhibit the advantage that they can target any tumors above 2-3 mm in size, as tumors require vascularization to grow beyond this size; thus, these methods enable localization of small solid tumors. Each possibility represents a separate embodiment of the present invention.

[0316] In another embodiment, a nucleic acid molecule or peptide of the present invention is homologous to a nucleic acid molecule or peptide disclosed herein. The terms “homology,” “homologous,” etc, when in reference to any protein or peptide, refer, in one embodiment, to a percentage of amino acid residues in the candidate sequence that are identical with the residues of a corresponding native polypeptide, after aligning the sequences and introducing gaps, if necessary, to achieve the maximum percent homology, and not considering any conservative substitutions as part of the sequence identity. Methods and computer programs for the alignment are well known in the art.

[0317] Homology is, in another embodiment, determined by computer algorithm for sequence alignment, by methods well described in the art. For example, computer algorithm analysis of nucleic acid sequence homology may include the utilization of any number of software: packages available, such as, for example, the BLAST, DOMAIN, BEAUTY (BLAST Enhanced Alignment Utility), GENPEPT and TREMBL packages.

[0318] In another embodiment, “homology” refers to identity to a sequence selected from SEQ ID No: 1-16, 18-23, 25-26, 28-32, 34-46, 48-58, 60-66, 68-70, and 85-211 of greater than 70%. In another embodiment, “homology” refers to identity to a sequence selected from SEQ ID No: 1-16, 18-23, 25-26, 28-32, 34-46, 48-58, 60-66, 68-70, and 85-211 of greater than 72%. In another embodiment, “homology” refers to identity to one of SEQ ID No: 1-16, 18-23, 25-26, 28-32, 34-46, 48-58, 60-66, 68-70, and 85-211 of greater than 75%. In another embodiment, “homology” refers to identity to a sequence selected from SEQ ID No: 1-16, 18-23, 25-26, 28-32, 34-46, 48-58, 60-66, 68-70, and 85-211 of greater than 78%. In another embodiment, “homology” refers to identity to one of SEQ ID No: 1-16, 18-23, 25-26, 28-32, 34-46, 48-58, 60-66, 68-70, and 85-211 of greater than 80%. In another embodiment, “homology” refers to identity to one of SEQ ID No: 1-16, 18-23, 25-26, 28-32, 34-46, 48-58, 60-66, 68-70, and 85-211 of greater than 82%. In another embodiment, “homology” refers to identity to a sequence selected from SEQ ID No: 1-16, 18-23, 25-26, 28-32, 34-46, 48-58, 60-66, 68-70, and 85-211 of greater than 83%. In another embodiment, “homology” refers to identity to one of SEQ ID No: 1-16, 18-23, 25-26, 28-32, 34-46, 48-58, 60-66, 68-70, and 85-211 greater than 85%. In another embodiment, “homology” refers to identity to one of SEQ ID No: 1-16, 18-23, 25-26, 28-32, 34-46, 48-58, 60-66, 68-70, and 85-211 of greater than 87%. In another embodiment, “homology” refers to identity to a sequence selected from SEQ ID No: 1-16, 18-23, 25-26, 28-32, 34-46, 48-58, 60-66, 68-70, and 85-211 of greater than 88%. In another embodiment, “homology” refers to identity to one of SEQ ID No: 1-20 of greater than 90%. In another embodiment, “homology” refers to identity to one of SEQ ID No: 1-16, 18-23, 25-26, 28-32, 34-46, 48-58, 60-66, 68-70, and 85-211 of greater than 92%. In another embodiment, “homology” refers to identity to a sequence selected from SEQ ID No: 1-16, 18-23, 25-26, 28-32, 34-46, 48-58, 60-66, 68-70, and 85-211 of greater than 93%. In another embodiment, “homology” refers to identity to one of SEQ ID No: 1-16, 18-23, 25-26, 28-32, 34-46, 48-58, 60-66, 68-70, and 85-211 of greater than 95%. In another embodiment, “homology” refers to identity to a sequence selected from SEQ ID No: 1-16, 18-23, 25-26, 28-32, 34-46, 48-58, 60-66, 68-70, and 85-211 of greater than 96%. In another embodiment, “homology” refers to identity to one of SEQ ID No: 1-16, 18-23, 25-26, 28-32, 34-46, 48-58, 60-66, 68-70, and 85-211 of greater than 97%. In another embodiment, “homology” refers to identity to one of SEQ ID No: 1-16, 18-23, 25-26, 28-32, 34-46, 48-58, 60-66, 68-70, and 85-211 of greater than 98%. In another embodiment, “homology” refers to identity to one of SEQ ID No: 1-16, 18-23, 25-26, 28-32, 34-46, 48-58, 60-66, 68-70, and 85-211 of greater than 99%. In another embodiment, “homology” refers to identity to one of SEQ ID No: 1-16, 18-23, 25-26, 28-32, 34-46, 48-58, 60-66, 68-70, and 85-211 of 100%. Each possibility represents a separate embodiment of the present invention.

[0319] In another embodiment, homology is determined via determination of candidate sequence hybridization, methods of which are well described in the art (See, for example, “Nucleic Acid Hybridization” Hames, B. D., and Higgins S. J., Eds. (1985); Sambrook et al., 2001, Molecular Cloning, A Laboratory Manual, Cold Spring Harbor Press, N.Y.; and Ausubel et al., 1989, Current Protocols in Molecular Biology, Green Publishing Associates and Wiley Interscience, N.Y). For example methods of hybridization may be carried out under moderate to stringent conditions, to the complement of a DNA encoding a native caspase peptide. Hybridization conditions being, for example, overnight incubation at 42° C. in a solution comprising: 10-20% formamide, 5×SSC (150 mM NaCl, 15 mM trisodium citrate), 50 mM sodium phosphate (pH 7.6), 5×Denhardt's solution, 10% dextran sulfate, and 20 μg/ml denatured, sheared salmon sperm DNA.

[0320] Protein and/or peptide homology for any amino acid sequence listed herein is determined, in another embodiment, by methods well described in the art, including immunoblot analysis, or via computer algorithm analysis of amino acid sequences, utilizing any of a number of software packages available, via established methods. Some of these packages may include the FASTA, BLAST, MPsrch or Scanps packages, and may employ the use of the Smith and Waterman algorithms, and/or global/local or BLOCKS alignments for analysis, for example. Each method of determining homology represents a separate embodiment of the present invention.

[0321] In another embodiment, the present invention provides a kit comprising a reagent utilized in performing a method of the present invention. In another embodiment, the present invention provides a kit comprising a composition, tool, or instrument of the present invention.

[0322] “Contacting,” in another embodiment, refers to directly contacting the target cell with a composition of the present invention. In another embodiment, “contacting” refers to indirectly contacting the target cell with a composition of the present invention. Each possibility represents a separate embodiment of the present invention. In another embodiment, the composition of the present invention is carried in the subjects' bloodstream to the target cell. In another embodiment, the composition is carried by diffusion to the target cell. In another embodiment, the composition is carried by active transport to the target cell. In another embodiment, the composition is administered to the subject in such a way that it directly contacts the target cell. Each possibility represents a separate embodiment of the present invention.

### Pharmaceutical Compositions and Methods of Administration

[0323] Pharmaceutical compositions containing compositions of the present invention can be, in another embodiment, administered to a subject by any method known to a person skilled in the art, such as parenterally, paracancerally, transmucosally, transdermally, intramuscularly, intravenously, intra-dermally, subcutaneously, intra-peritonealy, intra-ventricularly, intra-cranially, intra-vaginally or intra-tumorally.

[0324] In another embodiment of methods and compositions of the present invention, the pharmaceutical compositions are administered orally, and are thus formulated in a form suitable for oral administration, i.e. as a solid or a liquid preparation. Suitable solid oral formulations include tablets, capsules, pills, granules, pellets and the like. Suitable liquid oral formulations include solutions, suspensions, dispersions, emulsions, oils and the like. In another embodiment of the present invention, the active ingredient is formulated in a capsule. In accordance with this embodiment, the compositions of the present invention comprise, in addition to the active compound and the inert carrier or diluent, a hard gelating capsule.

[0325] In another embodiment, the pharmaceutical compositions are administered by intravenous, intra-arterial, or intra-muscular injection of a liquid preparation. Suitable liquid formulations include solutions, suspensions, dispersions, emulsions, oils and the like. In another embodiment, the pharmaceutical compositions are administered intravenously and are thus formulated in a form suitable for intravenous administration. In another embodiment, the pharmaceutical compositions are administered intra-arterially and are thus formulated in a form suitable for intra-arterial administration.

[0326] In another embodiment, the pharmaceutical compositions are administered intra-muscularly and are thus formulated in a form suitable for intramuscular administration.

[0327] In another embodiment, the pharmaceutical compositions are administered topically to body surfaces and are thus formulated in a form suitable for topical administration. Suitable topical formulations include gels, ointments, creams, lotions, drops and the like. In another embodiment, for topical administration, the compositions are prepared and applied as solutions, suspensions, or emulsions in a physiologically acceptable diluent with or without a pharmaceutical carrier.

[0328] In another embodiment, the active compound is delivered in a vesicle, e.g. a liposome.

[0329] In other embodiments, carriers or diluents used in methods of the present invention include, but are not limited to, a gum, a starch (e.g. corn starch, pregeletanized starch), a sugar (e.g., lactose, mannitol, sucrose, dextrose), a cellulosic material (e.g. microcrystalline cellulose), an acrylate (e.g. polymethylacrylate), calcium carbonate, magnesium oxide, talc, or mixtures thereof.

[0330] In other embodiments, pharmaceutically acceptable carriers for liquid formulations are aqueous or non-aqueous solutions, suspensions, emulsions or oils. Examples of non-aqueous solvents are propylene glycol, polyethylene glycol, and injectable organic esters such as ethyl oleate. Aqueous carriers include water, alcoholic/aqueous solutions, emulsions or suspensions, including saline and buffered media. Examples of oils are those of animal, vegetable, or synthetic origin, for example, peanut oil, soybean oil, olive oil, sunflower oil, fish-liver oil, another marine oil, or a lipid from milk or eggs.

[0331] In another embodiment, parenteral vehicles (for subcutaneous, intravenous, intraarterial, or intramuscular injection) include sodium chloride solution, Ringer's dextrose, dextrose and sodium chloride, lactated Ringer's and fixed oils. Intravenous vehicles include fluid and nutrient replenishers, electrolyte replenishers such as those based on Ringer's dextrose, and the like. Examples are sterile liquids such as water and oils, with or without the addition of a surfactant and other pharmaceutically acceptable adjuvants. In general, water, saline, aqueous dextrose and related sugar solutions, and glycols such as propylene glycols or polyethylene glycol are preferred liquid carriers, particularly for injectable solutions. Examples of oils are those of animal, vegetable, or synthetic origin, for example, peanut oil, soybean oil, olive oil, sunflower oil, fish-liver oil, another marine oil, or a lipid from milk or eggs.

[0332] In other embodiments, the compositions further comprises binders (e.g. acacia, cornstarch, gelatin, carbomer, ethyl cellulose, guar gum, hydroxypropyl cellulose, hydroxypropyl methyl cellulose, povidone), disintegrating agents (e.g. cornstarch, potato starch, alginic acid, silicon dioxide, croscarmelose sodium, crospovidone, guar gum, sodium starch glycolate), buffers (e.g., Tris-HCl., acetate, phosphate) of various pH and ionic strength, additives such as albumin or gelatin to prevent absorption to surfaces, detergents (e.g., Tween 20, Tween 80, Pluronic F68, bile acid salts), protease inhibitors, surfactants (e.g. sodium lauryl sulfate), permeation enhancers, solubilizing agents (e.g., glycerol, polyethylene glycerol), anti-oxidants (e.g., ascorbic acid, sodium metabisulfite, butylated hydroxyanisole), stabilizers (e.g. hydroxypropyl cellulose, hyroxypropylmethyl cellulose), viscosity increasing agents (e.g. carbomer, colloidal silicon dioxide, ethyl cellulose, guar gum), sweeteners (e.g. aspartame, citric acid), preservatives (e.g., Thimerosal, benzyl alcohol, parabens), lubricants (e.g. stearic acid, magnesium stearate, polyethylene glycol, sodium lauryl sulfate), flow-aids (e.g. colloidal silicon dioxide), plasticizers (e.g. diethyl phthalate, triethyl citrate), emulsifiers (e.g. carbomer, hydroxypropyl cellulose, sodium lauryl sulfate), polymer coatings (e.g., poloxamers or poloxamines), coating and film forming agents (e.g. ethyl cellulose, acrylates, polymethacrylates) and/or adjuvants. Each of the above excipients represents a separate embodiment of the present invention.

[0333] The compositions also include, in another embodiment, incorporation of the active material into or onto particulate preparations of polymeric compounds such as polylactic acid, polyglycolic acid, hydrogels, etc, or onto liposomes, microemulsions, micelles, unilamellar or multilamellar vesicles, erythrocyte ghosts, or spheroplasts.) Such compositions influence, in another embodiment, the physical state, solubility, stability, rate of in vivo release, and rate of in vivo clearance.

[0334] The preparation of pharmaceutical compositions that contain an active component, for example by mixing, granulating, or tablet-forming processes, is well understood in the art. The active therapeutic ingredient is often mixed with excipients that are pharmaceutically acceptable and compatible with the active ingredient. For oral administration, the active agents are mixed with additives customary for this purpose, such as vehicles, stabilizers, or inert diluents, and converted by customary methods into suitable forms for administration, such as tablets, coated tablets, hard or soft gelatin capsules, aqueous, alcoholic or oily solutions. For parenteral administration, the active agents are converted into a solution, suspension, or emulsion, if desired with the substances customary and suitable for this purpose, for example, solubilizers or other substances.

[0335] Each of the above additives, excipients, formulations and methods of administration represents a separate embodiment of the present invention.

[0336] In one embodiment, the term “administering” refers to bringing a subject in contact with an active compound of the present invention. In another embodiment, administration is accomplished in vitro, i.e. in a test tube. In another embodiment, administration is accomplished in vivo, i.e. in cells or tissues of a living organism. Each possibility represents a separate embodiment of the present invention.

[0337] In one embodiment, the methods of the present invention comprise administering an active composition or compound of the present invention as the sole active ingredient. However, also encompassed within the scope of the present invention are methods for chemotherapy that comprise administering the active composition or compound in combination with one or more therapeutic agents (e.g. anti-tumor agents or cancer chemotherapy agents).

### EXPERIMENTAL DETAILS SECTION

### Example 1

### CD31-Based Immuno-LCM Successfully Captures Tumor Vascular Cells, Including Myeloid Cells

### Materials and Experimental Methods

### Tissues

[0338] Stage-III epithelial ovarian cancer and ductal breast cancer specimens were collected at the University of Turin, Italy, following informed consent, from previously untreated patients. Additional ovarian cancer specimens, and normal ovaries were collected at the University of Pennsylvania Medical Center after obtaining written informed consent under Institutional Review Board (IRB)-approved protocols. Malignant mesothelioma (n=3), non-small cell lung carcinoma (n=3) (provided by Dr. Steven M. Albelda) and malignant melanoma (n=3) (provided by Dr. David Elder) were collected after obtaining written informed consent under IRB-approved protocols. A panel of normal human tissues (FIG. 3B) was provided by the Cooperative Human Tissue Network. All specimens were processed in compliance with HIPAA requirements.

### Reagents

[0339] Antibody against human CD31 (BD Pharmingen) followed by secondary antibodies (Vector, Burlingame, Calif.) were diluted (1:10) in PBS containing RNA Protector (1:10, Roche, Basel, Switzerland). Streptavidin conjugate and AEC chromagen (Dako, Carpenteria, Calif.) were diluted in PBS containing RNA Protector. Laser Capture Microdissection (LCM) was performed using Microcut (MMI, Glattbrugg, Switzerland), employing less than three hours per slide.

### RNA Isolation

[0340] In order to increase RNA yield, dissected samples were treated with pre-digested proteinase-K. RNA was isolated using TRIzol reagent microprotocol (Gibco, Carlsbad, Calif.). Glycogen carrier (20 μg) was utilized to increase RNA yield in all protocols. RNA integrity and quantity were assayed using the Bioanalyzer (Agilent, Foster City, Calif.).

### RNA Amplification

[0341] RNA was amplified using Messageamp® (Ambion, Austin, Tex.), with the following modifications: First-strand synthesis was performed at 42° C. (2 hours), then 48° C. (10 min). After second-strand synthesis, RNA was transcribed at 37° C. (12 hours); T7-polymerase and RNAse inhibitor were added and transcription was continued for 12 more hours. After 2 rounds of amplification, cRNA was biotin-labeled (12-24 hours, ENZO RNA labeling kit, Farmingdale, N.Y.) and purified using RNA cleanup (Qiagen, Valencia, Calif.).

### Array Analysis

[0342] Biotin-labeled cRNA was fragmented and hybridized to U133 (HG-U133) Set arrays (Affymetrix, Santa Clara, Calif.) representing more than 39,000 transcripts were derived from approximately 33,000 well-substantiated human genes, and scanned.

qRT-PCR

[0343] qRT-PCR was performed using primers to the 3′ end of transcripts spanning intron-exon boundaries whenever possible (Table 3) for 35 cycles using Sybergreen® (ABI, Foster City, Calif.), with primers at 150 nM concentrations. Primers were 18-24 nucleotides and were designed to have a TM of 59-61° C. All transcripts were confirmed using 3% agarose gel electrophoresis. Gene expression was normalized against β-actin in all studies unless stated otherwise.

### Immunostaining

[0344] For validation studies, immunohistochemistry (IHC) was performed using the VECTASTAIN ABC kit (Vector, Burlingame, Calif.). All primary antibodies were incubated for one hour. Immuno-reaction was visualized with 3,3′-diaminobenzidine (Vector). All staining steps were performed at room temperature.

### In Situ Hybridization (ISH)

[0345] DIG-labeled antisense RNA probes were generated by PCR amplification of 500-600-bp products incorporating T7 promoters into the antisense primers, followed by in vitro transcription with DIG RNA labeling reagents and T7 RNA polymerase (Roche, Indianapolis, Ind.). For immunodetection, an HRP-rabbit anti-DIG antibody (GenPoint kit; DAKO) was used and biotinyl-tyramide was included to catalyze biotin deposition (Perkin Elmer, Boston, Mass.). A second round of amplification utilized anti-biotin-HRP linked antibody (DAKO) followed by biotinyl-tyramide. Biotin was detected using a streptavidin-Cy3 conjugate (Arcturus) at 1:200 for 5 minutes. Slides were then washed and mounted with fluorescent mounting media containing DAPI (Vector).

### Cells

[0346] Human PBMCs were obtained through leukapheresis from healthy donors and were cultured for 7 days in DC media supplemented with 800 IU/ml human GM-CSF and 400 IU of IL-4. Cells were collected on day 7, labeled with CFSE, and incubated in media enriched with recombinant human (rh)VEGF₁₆₅ (60 ng/ml, Peprotech, Rocky Hill, N.J.) with or without VEGF-A neutralizing antibody (R&D Systems, Minneapolis Minn.) for seven days. Human peripheral blood monocytes were collected through elutriation. This population is highly enriched (greater than 95%) for CD14⁺ monocytes. Cells were processed exactly as above, treating them with GM-CSF and IL-4 for 7 days and with rhVEGF-A with or without VEGF-A neutralizing antibody for 7 additional days.

[0347] Endothelial progenitor assays were performed using the Endocult® assay (Stem Cell Technologies, Vancouver, Canada).

[0348] Human CD45⁺ VE-cadherin⁺ vascular leukocytes and CD45⁻ VE-cadherin⁺ tumor endothelial cells were sorted from mechanically dispersed ovarian cancers by FACS performed with MoFlo Cell Sorter (Cytomation, Fort Collins, Colo.) using a FITC-labeled rabbit anti-human VE-cadherin antibody (Medsystems Diagnostics GmbH, Vienna, Austria) and APC-anti-CD45 (HI30; BD Pharmingen, San Diego, Calif.). PBS containing 10% normal murine serum (Sigma, St. Louis, Mo.) and 25 mg/ml anti-mouse Fc receptor (2.4G2 BD Pharmingen) was added prior to incubation to avoid nonspecific binding.

### Mice and Xenograft Tumors

[0349] NOD/LtSz-SCID/β2-microglobulin knockout (NOD/SCID/β2M^{-/-}) mice were bred and maintained under conditions approved by the Animal Care Committee of the University of Pennsylvania. These mice lack adaptive immunity and exhibit a severe defect in NK cell function, permitting superior engraftment of human leukocytes. Female mice were transplanted subcutaneously with 0.3 ml cold Matrigel® (BD Biosciences, Bedford, Mass.) containing 1×10⁶ 2008 cells alone or enriched with 1×10⁵ DC, VLC or TEC into bilateral axillae. Tumors were resected at 3 weeks, RNA was extracted by the TRIzol method and analyzed for tumor vascular markers by qRT-PCR.

### Flow Cytometry

[0350] DCs generated in vitro from PBMC or monocytes, and CFSE-labeled DC treated in vitro with VEGF-A were subjected to flow cytometry, using FACSCanto® flow cytometer and CellQuest 3.2.1f1 software (both Becton Dickinson). These studies used biotin anti-VE-cadherin antibody (Medsystems Diagnostics GmbH, Vienna, Austria) coupled with streptavidin-PE-Cy7, APC anti human CD45 antibody and IgG control (BD Pharmingen).

### Bioinformatic and Statistical Analyses

[0351] Statistical significance for mRNA expression differences between tissue types was determined using a two-tailed Student's t-Test. Pearson's correlation was used to determine linearity of arrays performed with one versus two rounds of amplification or before and after immuno-LCM. Analyses of expression profiles were performed using Genespring software (Agilent); all samples were normalized with the median defined as 1.0. A heat map condition tree was developed using a hierarchical clustering algorithm (Genespring®) excluding all genes where the difference between the means of the tumor and normal vascular samples was less than its standard error. Descriptive statistics were performed with the SPSS® statistics software package (SPSS, IL, USA). The algorithm for the nonparametric method based on the ranks of the expression level for tumor and normal samples was developed in SAS 9.1.

### Optimization of Immunostaining

[0352] To procure highly purified tumor vasculature, a rapid and reliable immuno-LCM protocol was established for microarray applications. Different fixation conditions were tested, including −20° C. acetone; 70% ethanol:10% acetic acid (1:1, vol:vol); methanol; or 4% paraformaldehyde. Fixation with acetone or ethanol-based fixatives resulted in the greatest RNA yield (FIG. 2A). Acetic acid:ethanol fixation did not enable optimal IHC visualization of select target proteins. Acetone fixation was chosen for all further experiments.

[0353] Next, immunostaining was optimized. RNA isolated from tissue sections after standard IHC using LSAB (Dako) or Vectastain (Vector) showed near-complete degradation (FIG. 2B-6). We thus developed an ultra-fast IHC protocol with increased concentrations of reagents. High concentrations of RNAse inhibitor were added to all aqueous solutions. The choice of RNAse inhibitor was critical for RNA integrity. RNA Protector® (Roche) was found to be superior to placental RNAse inhibitor (Stratagene) or SuperRNAsin® (Ambion), leading to two-fold increase in RNA yield and integrity (FIG. 2B). Combining RNAse inhibitors reduced the efficacy of RNA Protector. Addition of RNA Protector to IHC allowed for 90% preservation of RNA integrity, based upon comparison of ribosomal RNA ratios determined using the Agilent Bioanalyzer.

[0354] Next detection systems were compared. AEC chromagen resulted in 40% greater RNA yield than DAB. Immunofluorescence resulted in 100% increased RNA yield compared to AEC (FIG. 1C), but contaminating cells were poorly identifiable without counterstaining, as assessed by qRT-PCR detection of the T-cell marker CD3-s. Furthermore, fluorescence quenching limited LCM time. Thus, AEC IHC was used for subsequent experiments.

[0355] In addition, the effect of LCM time on RNA yield and integrity was examined. Leaving immunostained tissue sections at room temperature for up to three hours before RNA was isolated had no significant impact on the quality or quantity of RNA isolated (FIG. 1D).

### Optimization of RNA Purification.

[0356] RNA amplification methods (Arcturus Picopure kit, Stratagene microRNA isolation kit, Zymo mini RNA isolation kit and the modified TRIzol method for less than 10⁵ cells) were compared for RNA yield and quality after immuno-LCM. Arcturus Picopure gave the highest RNA yield for tissues stained with hematoxylin alone, but not following IHC (FIG. 2E). The protocol from ZYMO also resulted in low RNA yield. Conversely, the Stratagene micro RNA isolation kit and the modified TRIzol method gave significantly better and similar yields by quantification with the Agilent Bioanalyzer.

[0357] RNA quality was tested by qRT-PCR of GADPH and β-actin transcripts in total RNA procured from 1×10⁶ cells microdissected and processed as in Table 2. GADPH or β-actin transcripts were detected at similar levels in RNA isolated with the modified TRIzol method using phase-lock tubes (Eppendorf, Hamburg, Germany) or with the Stratagene micro RNA isolation kit. Arcturus picopure and ZYMO RNA isolation kits were 10-fold and 256-fold less sensitive, respectively (FIG. 2F).

[0358] The resulting protocol, requiring approximately 25 minutes for IHC, proved successful for numerous antibodies (Table 1). While some antibodies required longer incubation times (up to 15 minutes), there was no loss of RNA yield or integrity. Staining was quite specific, even with high concentrations of antibody. The protocol was reproducibly able to capture 500,000 μm² of tumor vascular cells in 3 hours of microdissection and recover ˜20 ng total RNA. RNA was reproducibly amplified to 15 μg of biotin-labeled cRNA.

### Optimization of RNA Amplification

[0359] The linearity of amplifications using Ambion MessageAmp was tested by comparing the gene expression profile of 10 μg unamplified whole tumor RNA to amplified 6, 24 or 60 ng of the same RNA. Transcriptional profiling was performed using Affymetrix U133 chips. Correlation between unamplified RNA and 24 or 60 ng input RNA was high (r²=0.93 and 0.94, respectively) (FIG. 2G). Correlation was lower with 6 ng input RNA (r²=0.87). High correlation was found between gene expression profiles from amplifications of input. RNA procured from the same tumor performed within the same experiment (intra-assay, r²=0.99) or in different experiments (inter-assay, r²=0.97). Immuno-LCM had no impact on expression profile (FIG. 1C).

TABLE 1
List of antibodies tested, company and clone used in the study as
indicated.
Success with staining using the rapid IHC protocol for LCM following
fixation in acetone or acetic acid/ethanol (AA/EtOH) is reported
on the side for tested antibodies.

| Antibody | Company | Clone | Acetone | AA/EtOH |
|---|---|---|---|---|
| Biot hCD45 | BD Pharm | H130 | *** | −− |
| Biot hCD31 | Ancell | 158-2B3 | *** | ** |
| Biot hCD31 | Caltag | MBC 78.2 | ** | ** |
| hCD31 | Dako | JC70A | ** | ** |
| Biot CD146 | Chemicon | MAB16985B | *** | *** |
| CytoKeratin | Dako | AO575 | * | −− |
| Biot hCD3 | BD Pharm | UCHT1 | *** | −− |
| Fitc hCD31 | BD Pharm | WM59 | *** | *** |
| SMA-α-Cy3 | Sigma | 1A4 | ND | ND |
| FOLH1 | Zymed | ZMD.80 | ND | ND |
| STC2 | Genway | A22017 | ND | ND |
| Biot CD74 | BD Pharm | Mb741 | ND | ND |
| AML-1 | Active Motif | Polyclonal | ND | ND |
| hCD34-PE | BD Pharm | 581 | ND | ND |
| F-Spon | Abcam | Ab14271-50 | ND | ND |
| Lrp4 | Abcam | Ab13388-25 | ND | ND |
| Endothelial | Cayman Chemical | Polyclonal | ND | ND |
| Lipase | | | | |

(−−), poor stain,
(*) fair stain,
(**) good stain,
(***) excellent stain.
ND, not determined.

[0360] The optimized Immuno-LCM protocol is summarized in Table 2.

TABLE 2
Summary of Immuno-LCM Protocol

| | |
|---|---|
| Tumor | Freshly cut 8 μm sections of snap frozen tumor |
| IHC** | Fix in −20° C. Acetone - 4 min |
| | Incubate with primary Ab 1:10 - 5 min |
| | Incubate with 3x biotinylated anti-mouse Ab |
| | (Vector) - 5 min. |
| | Brief wash in PBS |
| | 2.5X Streptavidin-biotin amplification |
| | (DAKO) - 5 min |
| | Brief wash in PBS |
| | AEC (DAKO) stain - 3 to 5 min |
| | Brief wash in PBS |
| | Stain with dilute hematoxylin |
| | Rinse |
| | (** All steps with 1:10 RNAse Protector) |
| LCM | Dry tissue sections with hair dryer - 1 min |
| | Microdissect cells - up to 3 hours |
| RNA isolation | Treat with Proteinase K (10 μg/ml) - 8 min |
| | Extract RNA with TRIzol in phase lock gel - 1 hour |
| RNA Amplification | Use Ambion MessageAmp |

[0361] During the optimization of RNA isolation and amplification methodology, it was found that the immuno-LCM procedure had minimal impact on RNA integrity (FIG. 2A-F) or gene expression profiling (FIGS. 1C and 2G).

[0362] The PCR primers used for qRT-PCR and in situ hybridization are set forth in Table 3 below. A: qRT-PCR; B: T7 polymerase. (This table also includes primers used to amplify controls [those from CD3eps to GAPDH] and additional markers that do not appear in Table 5; selection of these additional markers is described below in Example 11).

TABLE 3A

| | FORWARD PRIMER; | REVERSE PRIMER; |
|---|---|---|
| GENE | SEQ ID | SEQ ID |
| Adlican 5′ | cattgctagacacgtggaaaga; 212 | tctcattgccgtgaatcataag; 213 |
| Adlican 3′ | aggaaccctcaagctggact; 214 | cattggcaaacaccttgattc; 215 |
| C11ORF8 | cttcaaagagtgggctgtgtg; 216 | gaggcattgatgtacgttgtg; 217 |
| CD31 | tttggctagtccttgttctttgg; 218 | cggtgtcttcaggttggtattc; 219 |
| Coll 11α1 | agggtgaagatggagatcctg; 220 | tttcaccttgtcttccctctg; 221 |
| Cytokeratin 18 | gcgtacagagatggagaacgaat; 222 | cgagactccagctctaccttgtt; 223 |
| EGFL6 | agaagaccacgagtgaggatg; 224 | ccacgttctgcttcaaaaatg; 225 |
| F2RL1 | tgctagcagcctctctctcc; 226 | tttccagtgacgtgggatg; 227 |
| FJX1 | actacctgacggccaacttc; 228 | cgcctcattgtccagaaag; 229 |
| FZ10 | cagactaaaacgctggactgc; 230 | tcttggaggtccaaatccac; 231 |
| GAPDH | cctgcaccaccaactgctta; 232 | catgagtccttccacgatacca; 233 |
| GPM6B | tcctatcacctgttcattgtgg; 234 | gcagcaatcttcccgactc; 235 |
| LZTS1 | agggagaagaccagcttcg; 236 | aggatctcgctagccttgg; 237 |
| OLFML2B | ccaaaggatgagcggatttac; 238 | gctgtacgggagcttgtagg; 239 |
| α-SMA | actgagcgtggctattccttc; 240 | agtggccatctcattttcaaag; 241 |
| SLIT2 | gaaatctcttgtcgaggggaaag; 242 | acacccacctctgcactctaatc; 243 |
| SPON-1 | agtgagcagctgaaggaagagt; 244 | catgtaacgttcctgaattccac; 245 |
| STC2 | tacctcaagcacgacctgtg; 246 | gtcagcagcaagttcacgag; 247 |
| TNFαIP6 | cgcaacttacaagcagctagag; 248 | taatgccagtttttccaaatcc; 249 |
| TNFRSF21 | gcttcttcgtggatgagtc; 250 | ccgcaacactgtgtccttc; 251 |
| (DR6) | | |

TABLE 3B

| | FORWARD, ISH; | REVERSE, T7; |
|---|---|---|
| Gene | SEQ ID | SEQ ID |
| Adlican | caagatcgaggccagtatatgtg; | gcaaacaccttgattctgctatc; |
| | 252 | 253 |
| CD31 | tgaggttctgagggtgaagg; | ggatcctaatacgactcactatagggagattgggatctga |
| | 254 | cattttctcg; 255 |
| EGFL6 | agaagaccacgagtgaggatg; | ggatcctaatacgactcactatagggagatgaggaggg |
| | 256 | gagataaactgac; 257 |
| FJX1 | actacctgacggccaacttc; | ggatcctaatacgactcactatagggagattcctcccggt |
| | 258 | gacactaag; 259 |
| FZ10 | cagactaaaacgctggactgc; | ggatcctaatacgactcactatagggagatcctttcagtgt |
| | 260 | atcacagcatc; 261 |
| GPM6B | tcctatcacctgttcattgtgg; | ggatcctaatacgactcactatagggagatgaaactggtt |
| | 262 | atcaggcaatc; 263 |
| TNFαIP6 | acggtctggcaaatacaagc; | ggatcctaatacgactcactatagggagaactgatgatgt |
| | 264 | catctggaagc; 265 |
| TNFRSF2 | ggcttcttcgtggatgagtc; | ggatcctaatacgactcactatagggagacacacacaca |
| 1 | 266 | caccccaaac; 267 |

### Results

[0363] A rapid protocol was developed and optimized for immuno-LCM, followed by extraction and amplification of RNA for array analysis of tumor vascular cells (TVC). 4×10³ CD31⁺ cells with vascular morphology were isolated (FIG. 1A). RT-PCR analysis of RNA from purified TVC confirmed the absence of lineage-specific markers CD3-s and CD5 (T-cells); CD16 (NK cells); CD19 and CD20 (B-cells); and cytokeratin-18 (tumor cells) (FIG. 1B). In addition, expression of the myeloid markers CD45, CD11c and CD14 was detected, confirming that TVC had been isolated. These findings were further confirmed by quantitative real-time polymerase chain reaction (qRT-PCR), which revealed a 15-fold enrichment of CD31 mRNA, similar expression of monocyte markers, and absence of cytokeratins and CD3-ε in micro-dissected TVC specimens relative to whole tumor. Smooth muscle α-actin was detectable in only 50% of samples and at 10-fold reduced levels relative to whole tumor, showing that few, in any perivascular cells were present.

[0364] Thus, the method successfully captured vascular cells, including vascular cells of monocytic lineage.

### Example 2

### mRNA Profile of Immuno-LCM Procured Tumor Vascular Cells

[0365] The mRNA profiles of micro-dissected TVC from 2 tumor samples were analyzed in parallel to 3 micro-dissected normal ovary vascular cells and to cultured human umbilical vein endothelial cells (HUVEC) using Affymetrix-U133 arrays. 13/13 known pan-endothelial markers in were detected in the TVC arrays. Similarly, 14/15 known tumor endothelial-specific markers (those listed below, Tem-4, and Tem-9) were exclusively expressed or markedly overexpressed (p<0.001) in TVC arrays (Table 4): These findings indicate that the protocol exhibits a sensitivity of greater than 90%.

TABLE 4
Expression of pan-endothelial and tumor endothelial markers in HUVEC; endothelial
cells from normal ovary isolated through immuno-LCM (Normal); and tumor
endothelial cells from ovarian cancer specimens isolated through
immuno-LCM (Tumor 1 and Tumor 2).

| | HUVEC | Normal | Tumor 1 | Tumor 2 |
|---|---|---|---|---|
| Pan Endothelial Markers | | | | |
| Angiomodulin | + | + | + | + |
| Hevin | + | + | + | + |
| Connective tissue growth factor | + | + | + | + |
| Collagen, type VI, alpha 1 | + | + | + | + |
| Interferon induced transmembrane protein 1 | + | + | + | + |
| Guanine nucleotide binding protein 11 | + | + | + | + |
| Von Willebrand factor | + | + | + | + |
| SmLIM | + | + | + | + |
| Collagen, type XVIII, alpha 1 | + | + | + | + |
| Insulin-like growth factor-binding protein 4 | + | + | −− | + |
| P1H12 (CD146) | +/− | +/− | +/− | +/− |
| Osteonectin | + | + | + | + |
| Matrix Gla protein | + | + | + | + |
| Tumor Endothelial Markers | | | | |
| TEM-1 | −− | + | + | + |
| TEM-3/TEM-7 | −− | + | + | + |
| TEM-5 | +/− | +/− | +/− | + |
| TEM-6 | + | + | + | + |
| TEM-8 | −− | −− | −− | −− |
| MMP-11 | −− | −− | +/− | + |
| Gelatinase A | +/− | +/− | + | + |
| Nidogen | + | −− | +/− | + |
| Collagen, type VI, alpha 3 | −− | + | + | + |
| Thy-1 cell surface antigen | −− | −− | + | + |
| Collagen, type III, alpha 1 | + | + | + | + |
| Bone morphogenetic protein 1 | −− | −− | +/− | + |
| Cystatin S | + | −− | −− | −− |
| Macrophage mannose receptor family | +/− | +/− | +/− | +/− |

(+) indicates detection of the gene with all associated probe sets, when more than one probe set exists;
(+/−): detection with one but not all probe sets associated with the gene;
(−−): lack of detection with any associated probe sets for the indicated gene.

[0366] Next, vascular cells from 21 stage-III ovarian tumors and 4 normal ovaries were microdissected, profiled and analyzed. In order to determine if there was a distinct signature that could distinguish tumor from normal vasculature, unsupervised hierarchical clustering was performed using 17,920 genes (after elimination of all genes wherein the difference between tumor and normal means was less than the standard error of the difference in the means). Hierarchical clustering of these samples accurately classified tumor from normal vascular cells, demonstrating a clear difference in the molecular profile between tumor and normal vasculature and further confirming the validity and accuracy of the method used (FIG. 1D).

[0367] To identify robust, tumor vasculature-specific genes, the 17,920 genes were further characterized using (1) the fold difference comparing tumor to normal vascular samples; (2) the number of tumor and normal vascular samples where a gene was classified as “present” or “absent” by MAS5.0 Suite (Affymetrix); and (3) the gene-specific ranks of the normalized gene expression values for all samples. 70 genes were selected as tumor vascular markers (TVM) that fulfilled at least 1 of the following 3 criteria: (1) present in more than 15/21 TVC samples and absent in more than 3/4 normal vascular samples; (2) present in more than 18/21 tumor vascular samples and at least 3-fold up-regulated on average in tumor vascular samples; or (3) at least 3/4 normal samples had 1 of the 5 lowest ranked expression values (therefore at least 20/21 tumor vascular samples had higher expression values relative to normal samples) (Table 5). By this method, a number of transcripts previously not known to be TVM were identified, e.g. adlican, GPM6B, TNFaIP6, LZTS1 and numerous expressed sequence tags (EST). The identified markers also included several known TVM (FolH1 (PSMA), Thy-1, TEM-7, SLIT2, and chondroitin-sulfate proteoglycan-2 (versican)), further validating the methods used to identify TVM.

TABLE 5
List of 70 TVM identified by three independent analyses. Genes
were included in the list if they fulfilled tumor vascular marker criteria in
at least one of the analyses. The table describes results from all analyses
for each gene. First column lists genes reported by common gene
name and ESTs reported by Genebank admission; second column
describes expression fold change in tumor relative to normal vascular
cells; third column describes the number of tumor (total of 21) and
normal (total of four) vascular cell specimens for which the gene was
determined to be expressed; fourth column describes the expression
rank of the four normal vascular cell samples (with 1 being the
lowest expression and 25 the highest).

| | Fold | | | |
|---|---|---|---|---|
| | Change | | | |
| Common Gene | Tumor | No. Present in | | Rank of |
| Name or | vs. | Tumor | Normal | Normal |
| Genebank No. | Normal | [21) | (4] | Specimens |
| ADAM12 | 5.1 | 13 | 0 | 1, 2, 4, 6 |
| Adlican | 5.4 | 19 | 2 | 1, 2, 5, 8 |
| AI798118 | 7.7 | 15 | 0 | 1, 2, 3, 5 |
| AK000168 | 3.0 | 17 | 1 | 4, 6, 7, 15 |
| AMI-1 | 30 | 12 | 0 | 1, 2, 3, 5 |
| ANKRD9 | 3.2 | 16 | 1 | 1, 4, 7, 16 |
| Av758342 | 4.0 | 17 | 2 | 1, 2, 9, 10 |
| AW242409 | 4.9 | 17 | 2 | 1, 3, 5, 9 |
| Aw510657 | 3.9 | 18 | 4 | 4, 5, 6, 7 |
| AW517716 | 7.4 | 12 | 0 | 1, 2, 3, 13 |
| BDKRB2 | 3.7 | 15 | 1 | 2, 3, 5, 11 |
| C6orf37 | 5.2 | 15 | 1 | 2, 3, 5, 7 |
| C6orf55 | 2.4 | 18 | 1 | 1, 2, 3, 8 |
| C6orf69 | 2.0 | 19 | 3 | 1, 2, 4, 7 |
| C7orf32 | 3.4 | 16 | 1 | 1, 2, 4, 7 |
| C11orf8 | 4.08 | 13 | 1 | 1, 2, 5, 17 |
| CD24 | 3.7 | 16 | 1 | 2, 6, 7, 8 |
| CD51 | 3.7 | 15 | 2 | 1, 2, 3, 8 |
| CENTA2 | 2.1 | 16 | 3 | 1, 3, 4, 5 |
| CLDN1 | 2.4 | 16 | 1 | 1, 2, 3, 13 |
| COL11A1 | 10.1 | 15 | 0 | 1, 2, 7, 8 |
| COL15A1 | 4.8 | 21 | 4 | 1, 3, 8, 12 |
| COL22A1 | 3.5 | 11 | 0 | 1, 2, 3, 5 |
| CSPG2 | 5.8 | 21 | 4 | 1, 2, 3, 6 |
| DEFB1 | 2.4 | 11 | 0 | 1, 2, 4, 13 |
| DSG2 | 4.2 | 11 | 1 | 2, 3, 15, 17 |
| EGFI6 | 4.6 | 19 | 4 | 1, 2, 6, 7 |
| EIF2AK4 | 2.8 | 18 | 1 | 1, 2, 4, 9 |
| EBP41L3 | 4.0 | 16 | 2 | 1, 4, 5, 13 |
| ESM1 | 3.7 | 20 | 1 | 1, 4, 5, 7 |
| FBXO32 | 2.2 | 16 | 1 | 1, 2, 5, 8 |
| FJX1 | 11.3 | 16 | 0 | 1, 2, 3, 5 |
| FOLH1 | 8.8 | 13 | 1 | 1, 2, 4, 6 |
| FLJ22875 | 2.3 | 16 | 0 | 2, 3, 6, 7 |
| FLJ46072 | 3.3 | 20 | 1 | 1, 2, 3, 5 |
| Fz2RL1 | 3.6 | 13 | 0 | 1, 7, 10, 12 |
| FZ010 | 2.0 | 15 | 0 | 2, 3, 6, 10 |
| GPM68 | 14.63 | 16 | 0 | 1, 2, 5, 6 |
| GPR105 | 3.3 | 11 | 0 | 1, 2, 6, 10 |
| HOXB7 | 2.8 | 16 | 1 | 1, 2, 7, 14 |
| IGSF4 | 5.0 | 18 | 1 | 1, 4, 5, 6 |
| IVNS1ABP | 3.3 | 21 | 4 | 1, 2, 3, 5 |
| KCNK5 | 2.5 | 16 | 1 | 1, 3, 5, 9 |
| LZTS1 | 4.3 | 19 | 1 | 1, 2, 6, 7 |
| MCM4 | 2.4 | 13 | 0 | 1, 2, 4, 6 |
| NID2 | 4.1 | 16 | 1 | 1, 4, 8, 15 |
| OlfML28 | 2.4 | 18 | 1 | 1, 2, 4, 11 |
| O88PL3 | 4.1 | 17 | 1 | 1, 3, 4, 20 |
| PCDH17 | 2.9 | 21 | 4 | 1, 3, 4, 7 |
| PLCE1 | 3.8 | 13 | 1 | 1, 3, 4, 16 |
| PLXDC1 | 4.0 | 21 | 3 | 1, 3, 5, 8 |
| PRDM1 | 2.4 | 15 | 0 | 1, 3, 4, 5 |
| RGC32 | 9.0 | 16 | 2 | 1, 3, 6, 8 |
| RGS1 | 8.0 | 12 | 1 | 2, 3, 5, 16 |
| RRM2 | 4.7 | 16 | 1 | 2, 4, 5, 21 |
| SCNN1A | 15.8 | 16 | 0 | 1, 2, 3, 6 |
| SCD2 | 4.42 | 20 | 2 | 1, 2, 6, 10 |
| SlamF6 (BLAME) | 3.5 | 13 | 0 | 2, 3, 6, 8 |
| SLIT2 | 2.0 | 16 | 1 | 3, 4, 6, 9 |
| SPON1 | 2.5 | 16 | 1 | 1, 6, 7, 17 |
| SPRY4 | 2.8 | 20 | 2 | 1, 2, 3, 5 |
| STC2 | 9.0 | 11 | 0 | 1, 2, 4, 5 |
| STCH | 4.0 | 15 | 2 | 1, 6, 7, 9 |
| TACSTD1 | 11.6 | 16 | 2 | 1, 2, 7, 10 |
| TARS | 2.8 | 16 | 1 | 2, 5, 9, 11 |
| TBX2 | 2.2 | 14 | 1 | 1, 5, 6, 24 |
| THY1 | 3.1 | 19 | 3 | 1, 2, 4, 8 |
| TNFAIP8 | 5.6 | 17 | 0 | 1, 2, 3, 6 |
| TNFSFR21 (DRS) | 8.2 | 11 | 0 | 1, 3, 4, 7 |
| UPP1 | 4.97 | 15 | 1 | 1, 3, 5, 20 |

TABLE 6

Sequences of the TVM and/or exemplary GenBank Accession No(s). Any GenBank Accession No. that
appears in this table or in any table or part of this specification is merely exemplary, and is not
intended to limit the sequence of the present invention to a particular isoform, a particular
species, or any other type of limitation. Each GenBank Accession No. represents a separate embodi-
ment of the present invention. Further, sequences presented herein as cDNA sequences (i.e. contain-
ing “t,” signifying thymidine) will be understood to also represent the corresponding RNA sequence
(i.e. containing “u” for uridine). Further, some of the sequences presented herein contain non-
coding sequences 5′ and/or 3′ to the coding sequence of the mRNA. In these cases, the isolated
coding sequence of the mRNA and methods comprising same represent another embodiment of the present
invention.

| Gene name and/or Exemplary | | |
|---|---|---|
| GenBank Accession No(s) | SEQ ID No. | Sequence and/or exemplary GenBank Accession Numbers |
| meltrin-L | 1 | AF023476 |
| precursor | | NM_003474 |
| (ADAM12) | | |
| Adlican | 2 | AF245505; Sequence below. |

atgcccaagcgcgcgcactggggggccctctccgtggtgctgatcctgctttggggccatccgcgagtggcgctggcctgcccgcatccttgt
gcctgctacgtccccagcgaggtccactgcacgttccgatccctggcttccgtgcccgctggcattgctagacacgtggaaagaatcaatttgg
ggtttaatagcatacaggccctgtcagaaacctcatttgcaggactgaccaagttggagctacttatgattcacggcaatgagatcccaagcatc
cccgatggagctttaagagacctcagctctcttcaggttttcaagttcagctacaacaagctgagagtgatcacaggacagaccctccagggtct
ctctaacttaatgaggctgcacattgaccacaacaagatcgagtttatccaccctcaagctttcaacggcttaacgtctctgaggctactccatttg
gaaggaaatctcctccaccagctgcaccccagcaccttctccacgttcacatttttggattatttcagactctccaccataaggcacctctacttag
cagagaacatggttagaactcttcctgccagcatgcttcggaacatgccgcttctggagaatctttacttgcagggaaatccgtggacctgcgat
tgtgagatgagatggtttttggaatgggatgcaaaatccagaggaattctgaagtgtaaaaaggacaaagcttatgaaggcggtcagttgtgtgc
aatgtgcttcagtccaaagaagttgtacaaacatgagatacacaagctgaaggacatgacttgtctgaagccttcaatagagtcccctctgagac
agaacaggagcaggagtattgaggaggagcaagaacaggaagaggatggtggcagccagctcatcctggagaaattccaactgccccagt
ggagcatctctttgaatatgaccgacgagcacgggaacatggtgaacttggtctgtgacatcaagaaaccaatggatgtgtacaagattcacttg
aaccaaacggatcctccagatattgacataaatgcaacagttgccttggactttgagtgtccaatgacccgagaaaactatgaaaagctatggaa
attgatagcatactacagtgaagttcccgtgaagctacacagagagctcatgctcagcaaagaccccagagtcagctaccagtacaggcagg
atgctgatgaggaagctctttactacacaggtgtgagagcccagattcttgcagaaccagaatgggtcatgcagccatccatagatatccagct
gaaccgacgtcagagtacggccaagaaggtgctactttcctactacacccagtattctcaaacaatatccaccaaagatacaaggcaggctcg
gggcagaagctgggtaatgattgagcctagtggagctgtgcaaagagatcagactgtcctggaagggggtccatgccagttgagctgcaacg
tgaaagcttctgagagtccatctatcttctgggtgcttccagatggctccatcctgaaagcgcccatggatgacccagacagcaagttctccattc
tcagcagtggctggctgaggatcaagtccatggagccatctgactcaggcttgtaccagtgcattgctcaagtgagggatgaaatggaccgca
tggtatatagggtacttgtgcagtctccctccactcagccagccgagaaagacacagtgacaattggcaagaacccaggggagtcggtgacat
tgccttgcaatgctttagcaatacccgaagcccaccttagctggattcttccaaacagaaggataattaatgatttggctaacacatcacatgtata
catgttgccaaatggaactctttccatcccaaaggtccaagtcagtgatagtggttactacagatgtgtggctgtcaaccagcaaggggcagac
cattttacggtgggaatcacagtgaccaagaaagggtctggcttgccatccaaaagaggcagacgcccaggtgcaaaggctctttccagagtc
agagaagacatcgtggaggatgaagggggctcgggcatgggagatgaagagaacacttcaaggagacttctgcatccaaaggaccaagag
gtgttcctcaaaacaaaggatgatgccatcaatggagacaagaaagccaagaaagggagaagaaagctgaaactctggaagcattcggaaa
aagaaccagagaccaatgttgcagaaggtcgcagagtgtttgaatctagacgaaggataaacatggcaaacaaacagattaatccggagcgc
tgggctgatattttagccaaagtccgtgggaaaaatctccctaagggcacagaagtacccccgttgattaaaaccacaagtcctccatccttgag
cctagaagtcacaccaccttttcctgctgtttctcccccctcagcatctcctgtgcagacagtaaccagtgctgaagaatcctcagcagatgtacct
ctacttggtgaagaagagcacgttttgggtaccatttcctcagccagcatggggctagaacacaaccacaatggagttattcttgttgaacctgaa
gtaacaagcacacctctggaggaagttgttgatgacctttctgagaagactgaggagataacttccactgaaggagacctgaaggggacagca
gcccctacacttatatctgagccttatgaaccatctcctactctgcacacattagacacagtctatgaaaagcccacccatgaagagacggcaac
agagggttggtctgcagcagatgttggatcgtcaccagagcccacatccagtgagtatgagcctccattggatgctgtctccttggctgagtctg
agcccatgcaatactttgacccagatttggagactaagtcacaaccagatgaggataagatgaaagaagacacctttgcacaccttactccaac
ccccaccatctgggttaatgactccagtacatcacagttatttgaggattctactataggggaaccaggtgtcccaggccaatcacatctacaag
gactgacagacaacatccaccttgtgaaaagtagtctaagcactcaagacaccttactgattaaaaagggtatgaaagagatgtctcagacact
acagggaggaaatatgctagagggagaccccacacactccagaagttctgagagtgagggccaagagagcaaatccatcactttgcctgact
ccacactgggtataatgagcagtatgtctccagttaagaagcctgcggaaaccacagttggtaccctcctagacaaagacaccacaacagtaa
caacaacaccaaggcaaaaagttgctccgtcatccaccatgagcactcacccttctcgaaggagacccaacgggagaaggagattacgccc
caacaaattccgccaccggcacaagcaaaccccacccacaacttttgccccatcagagactttttctactcaaccaactcaagcacctgacatta
agatttcaagtcaagtggagagttctctggttcctacagcttgggtggataacacagttaatacccccaaacagttggaaatggagaagaatgca
gaacccacatccaagggaacaccacggagaaaacacgggaagaggccaaacaaacatcgatataccccttctacagtgagctcaagagcg
tccggatccaagcccagcccttctccagaaaataaacatagaaacattgttactcccagttcagaaactatacttttgcctagaactgtttctctgaa
aactgagggcccttatgattccttagattacatgacaaccaccagaaaaatatattcatcttaccctaaagtccaagagacacttccagtcacatat
aaacccacatcagatggaaaagaaattaaggatgatgttgccacaaatgttgacaaacataaaagtgacattttagtcactggtgaatcaattact
aatgccataccaacttctcgctccttggtctccactatgggagaatttaaggaagaatcctctcctgtaggctttccaggaactccaacctggaatc
cctcaaggacggcccagcctgggaggctacagacagacatacctgttaccacttctggggaaaatcttacagaccctccccttcttaaagagct
tgaggatgtggatttcacttccgagtttttgtcctctttgacagtctccacaccatttcaccaggaagaagctggttcttccacaactctctcaagcat
aaaagtggaggtggcttcaagtcaggcagaaaccaccacccttgatcaagatcatcttgaaaccactgtggctattctcctttctgaaactagac
cacagaatcacacccctactgctgcccggatgaaggagccagcatcctcgtccccatccacaattctcatgtctttgggacaaaccaccaccac
taagccagcacttcccagtccaagaatatctcaagcatctagagattccaaggaaaatgttttcttgaattatgtggggaatccagaaacagaag
caaccccagtcaacaatgaaggaacacagcatatgtcagggccaaatgaattatcaacaccctcttccgaccgggatgcatttaacttgtctaca
aagctggaattggaaaagcaagtatttggtagtaggagtctaccacgtggcccagatagccaacgccaggatggaagagttcatgcttctcatc
aactaaccagagtccctgccaaacccatcctaccaacagcaacagtgaggctacctgaaatgtccacacaaagcgcttccagatactttgtaac
ttcccagtcacctcgtcactggaccaacaaaccggaaataactacatatccttctggggctttgccagagaacaaacagtttacaactccaagatt
atcaagtacaacaattcctctcccattgcacatgtccaaacccagcattcctagtaagtttactgaccgaagaactgaccaattcaatggttactcc
aaagtgtttggaaataacaacatccctgaggcaagaaacccagttggaaagcctcccagtccaagaattcctcattattccaatggaagactccc
tttctttaccaacaagactctttcttttccacagttgggagtcacccggagaccccagatacccacttctcctgccccagtaatgagagagagaaa
agttattccaggttcctacaacaggatacattcccatagcaccttccatctggactttggccctccggcacctccgttgttgcacactccgcagac
cacgggatcaccctcaactaacttacagaatatccctatggtctcttccacccagagttctatctcctttataacatcttctgtccagtcctcaggaa
gcttccaccagagcagctcaaagttctttgcaggaggacctcctgcatccaaattctggtctcttggggaaaagccccaaatcctcaccaagtcc
ccacagactgtgtccgtcaccgctgagacagacactgtgttcccctgtgaggcaacaggaaaaccaaagcctttcgttacttggacaaaggttt
ccacaggagctcttatgactccgaataccaggatacaacggtttgaggttctcaagaacggtaccttagtgatacggaaggttcaagtacaagat
cgaggccagtatatgtgcaccgccagcaacctgcacggcctggacaggatggtggtcttgctttcggtcaccgtgcagcaacctcaaatccta
gcctcccactaccaggacgtcactgtctacctgggagacaccattgcaatggagtgtctggccaaagggaccccagccccccaaatttcctgg
atcttccctgacaggagggtgtggcaaactgtgtcccccgtggagagccgcatcaccctgcacgaaaaccggaccctttccatcaaggaggc
gtccttctcagacagaggcgtctataagtgcgtggccagcaatgcagccggggcggacagcctggccatccgcctgcacgtggcggcactg
ccccccgttatccaccaggagaagctggagaacatctcgctgcccccggggctcagcattcacattcactgcactgccaaggctgcgcccct
gcccagcgtgcgctgggtgctcggggacggtacccagatccgcccctcgcagttcctccacgggaacttgtttgttttccccaacgggacgct
ctacatccgcaacctcgcgcccaaggacagcgggcgctatgagtgcgtggccgccaacctggtaggctccgcgcgcaggacggtgcagct
gaacgtgcagcgtgcagcagccaacgcgcgcatcacgggcacctccccgcggaggacggacgtcaggtacggaggaaccctcaagctg
gactgcagcgcctcgggggacccctggccgcgcatcctctggaggctgccgtccaagaggatgatcgacgcgctcttcagttttgatagcag
aatcaaggtgtttgccaatgggaccctggtggtgaaatcagtgacggacaaagatgccggagattacctgtgcgtagctcgaaataaggttggt
gatgactacgtggtgctcaaagtggatgtggtgatgaaaccggccaagattgaacacaaggaggagaacgaccacaaagtcttctacgggg
gtgacctgaaagtggactgtgtggccaccgggcttcccaatcccgagatctcctggagcctcccagacgggagtctggtgaactccttcatgc
agtcggatgacagcggtggacgcaccaagcgctatgtcgtcttcaacaatgggacactctactttaacgaagtggggatgagggaggaagga
gactacacctgctttgctgaaaatcaggtcgggaaggacgagatgagagtcagagtcaaggtggtgacagcgcccgccaccatccggaaca
agacttacttggcggttcaggtgccctatggagacgtggtcactgtagcctgtgaggccaaaggagaacccatgcccaaggtgacttggttgtc
cccaaccaacaaggtgatccccacctcctctgagaagtatcagatataccaagatggcactctccttattcagaaagcccagcgttctgacagc
ggcaactacacctgcctggtcaggaacagcgcgggagaggataggaagacggtgtggattcacgtcaacgtccagccacccaagatcaac
ggtaaccccaaccccatcaccaccgtgcgggagatagcagccgggggcagtcggaaactgattgactgcaaagctgaaggcatccccacc
ccgagggtgttatgggcttttcccgagggtgtggttctgccagctccatactatggaaaccggatcactgtccatggcaacggttccctggacat
caggagtttgaggaagagcgactccgtccagctggtatgcatggcacgcaacgagggaggggaggcgaggttgatcgtgcagctcactgtc
ctggagcccatggagaaacccatcttccacgacccgatcagcgagaagatcacggccatggcgggccacaccatcagcctcaactgctctg
ccgcggggaccccgacacccagcctggtgtgggtccttcccaatggcaccgatctgcagagtggacagcagctgcagcgcttctaccacaa
ggctgacggcatgctacacattagcggtctctcctcggtggacgctggggcctaccgctgcgtggcccgcaatgccgctggccacacggag
aggctggtctccctgaaggtgggactgaagccagaagcaaacaagcagtatcataacctggtcagcatcatcaatggtgagaccctgaagct
cccctgcacccctcccggggctgggcagggacgtttctcctggacgctccccaatggcatgcatctggagggcccccaaaccctgggacgc
gtttctcttctggacaatggcaccctcacggttcgtgaggcctcggtgtttgacaggggtacctatgtatgcaggatggagacggagtacggcc
cttcggtcaccagcatccccgtgattgtgatcgcctatcctccccggatcaccagcgagcccaccccggtcatctacacccggcccgggaaca
ccgtgaaactgaactgcatggctatggggattcccaaagctgacatcacgtgggagttaccggataagtcgcatctgaaggcaggggttcag
gctcgtctgtatggaaacagatttcttcacccccagggatcactgaccatccagcatgccacacagagagatgccggcttctacaagtgcatgg
caaaaaacattctcggcagtgactccaaaacaacttacatccacgtcttctgaaatgtggattccagaatgattgcttaggaactgacaacaaag
cggggtttgtaagggaagccaggttggggaataggagctcttaaataatgtgtcacagtgcatggtggcctctggtgggtttcaagttgaggttg
atcttgatctacaattgttgggaaaaggaagcaatgcagacacgagaaggagggctcagccttgctgagacactttcttttgtgtttacatcatgc
caggggcttcattcagggtgtctgtgctctgactgcaatttttcttcttttgcaaatgccactcgactgccttcataagcgtccataggatatctgagg
aacattcatcaaaaataagccatagacatgaacaacacctcactaccccattgaagacgcatcacctagttaacctgctgcagtttttacatgata
gactttgttccagattgacaagtcatctttcagttatttcctctgtcacttcaaaactccagcttgcccaataaggatttagaaccagagtgactgata
tatatatatatattttaattcagagttacatacatacagctaccattttatatgaaaaaagaaaaacatttcttcctggaactcactttttatataatgtttt
atatatatattttttcctttcaaatcagacgatgagactagaaggagaaatactttctgtcttattaaaattaataaattattggtctttacaagacttggat
acattacagcagacatggaaatataattttaaaaaatttctctccaacctccttcaaattcagtcaccactgttatattaccttctccaggaaccctcc
agtggggaaggctgcgatattagatttccttgtatgcaaagtttttgttgaaagctgtgctcagaggaggtgagaggagaggaaggagaaaact
gcatcataactttacagaattgaatctagagtcttccccgaaaagcccagaaacttctctgcagtatctggcttgtccatctggtctaaggtggctg
cttcttccccagccatgagtcagtttgtgcccatgaataatacacgacctgttatttccatgactgctttactgtatttttaaggtcaatatactgtacat
ttgataataaaataatattctcccaaaaaaaaaa

| | | |
|---|---|---|
| AI798118 | 3 | tttcaaatgttgccaaagtcatgggaactctagttaggaagatttcccctacttaga |
| | | gcatgtcactctggcgtggaccttcattcatctctttccccggcctggggttgatcc |
| | | attctcccttcttcccccttctcctgccctgcccccaccttctcagtcacaatctttgt |
| | | cttcccagtttggcaggacatcccaggggcccctgggctttccttcctgaggtta |
| | | gaagatggtgctttgaaagaacaattgctcctaccacccatcaaatcaaactttta |
| | | gaagctgataaaaaccttaaaaatcattcaatctcctcttctttctccttctgtagatg |
| | | aggaatctgagggtctaagaggagacatgagctgctgagattgactgagctag |
| | | gcagggccagacatagactccacgggcaggcccgcagtctttccaccaggtc |
| | | aggccactccctcgcccagggctcaagattccttttagagttcaacagagcagct |
| | | cccgagaacagaccagccctcaagactcaaatttcag |
| AK000168 | 4 | Sequence below. |

gttttctcatttgcaaccacccatgctggcatgaaagaaagtgaagctgctgggttgaactccatcttctgggggacatttgcagcctgcagggg
cctggcaatcttttttgctacctgtttacagcctggaaccatgattgtgttgagcaacattggcagcctgacttcatctttatttctggtgctttttgaca
agaacccaatttgtctctggatagcaacttcagtgtatggggcttcaatggcaaccacatttccgagtggtgtttcttggattgagcagtacacgac
catccatgggaaatctgcagcattttttgtaattggtgcttccctgggagaaatggctattcctgcagtcattggaattcttcaaggaaaataccctg
atttgcctgtagttctgtatacctctttgggagcatcaatagctactggtattttatttcctgtgctatataaattagccacttcacctcttgatcgccagc
gaaaagaagacagaaagagtgaggaccagaaagctctgctctctagctccgggctaaatgaatatgaggaagagaatgaagaggaggatg
cagaaaaatggaatgaaatggattttgaaatgattgaaacgaatgatacaatgaggcattctataatagagacatctagaagtagtctgacggag
cccacagctgaagtctataatcaatacccatcaaatgcactggtgtttgagtcttctccttttaatactggcagtgcccatgtgaagcacttgccag
aaaccaggacaaaagggactaacgtttagagaagatggattactcactgacatctttgaataactgccacttctaaggacgccattcagagcag
agcattagcagaatttcaccatgctttggggattaaaatttttaggtccatattatagcaaatgctaaaaatttttgaaatgttctgtaattcccagagt
cttccataaataaccaaatggtctcatacacgtacaataggatcttgttataacgctatcatttgacatgtgactgattaggaaatattttatggtctcc
acccctcagagcacccaaagaaggcattgtttttgagaaggggggtattctcagaatgagaccatgtaggagttgaattgattggttgaacaaat
tatcaggtatcaatatttttccaggaaagttgaggagaatagtttcataaaagagaaatgggccgggattacaggcttgagcccccgcgcccag
ccatcaaaatgctttttatttctgcatatgttgaatactttttacaatttaaaaaaatgatctgttttgaaggcaaaattgcaaatcttgaaattaagaagg
caaaaatgtaaaggagtcaaaactataaatcaagtatttgggaagtgaagactggaagctaatttgcattaaattcacaaacttttatactctttctgt
atatacattttttttctttaaaaaacaactatggatcagaatagccacatttagaacactttttgttatcagtcaatatttttagatagttagaacctggtcc
taagcctaaaagtgggcttgattctgcagtaaatcttttacaactgcctcgacacacataaacctttttaaaaatagacactccccgaagtcttttgtt
cgcatggtcacacactgatgcttagatgttccagtaatctaatatggccacagtagtcttgatgaccaaagtcctttttttccatctttagaaaactac
atgggaacaaacagatcgaacagttttgaagctactgtgtgtgtgaatgaacactcttgctttattccagaatgctgtacatctattttggattgtatat
tgtgtttgtgtatttacgctttgattcatagtaacttcttatggaattgatttgcattgaacacaaactgtaaataaaaagaaatggctgaaagaaaaaa
aaaaaaaaaaaaaaaaaaaaaaaaaa

| | | |
|---|---|---|
| acute myeloid | 5 | NM_001001890 |
| leukemia 1 | | NM_001754 |
| (AML-1) | | |
| (TEL/AML1; or | | |
| ETV6/RUNX1) | | |
| ankyrin repeat | 6 | BC015422 |
| domain 9 | | BC027479 |
| (ANKRD9) | | NM_152326 |
| AV758342 | 7 | atttganccccttnccttgaanccccatcgtatcgggacgcgcgccattgtgttggta |
| | | cccgggaattcggccattatggccgggagaaacgagatgggggtgaagctggag |
| | | atatttcggatgataatctacctcactttccctgtggctatgttctgggtttccaatcagg |
| | | ccgagtggtttgaggacgatgtcatacagcgcaagagggagctgtggccacctga |
| | | gaagcttcaagagatagaggaattcaaagagaggttacggaagcggcgggagga |
| | | gaagctccttcgcgacgcccagcagaactcctgaggcctccaagtgggagtccta |
| | | gcccctcccctgatgaaatatacatatactcagttccttgttaagaaaaaaaaannaa |
| | | aaaaaaaaaaaaaaaaacatgtcggccgcctcggcccagtcgactctagactcga |
| | | gcaagcttatgcatgcggccgcaattcgagctcacttggccaattcgccctatagtg |
| | | agtcgtatcacaattcactggcccgcgttttacaacgtcgtgacttggaaaaactcttg |
| | | ccgttacccaacctaaattgcctttgaacaaaaatcccctttgcgcaagttggctaata |
| | | tccaagagagcccgaaccaatcggcctttccaacagttgcccagcttgatgccaat |
| | | gaaattgtgagccttaaattttggttaaattcgggtaaatttttggttaatcagctcaatt |
| | | ttaacccaaaggccatggcccttt |
| AW242409 | 8 | atttcaaacaaatccaaaacttatttttgtttatagaaacaagacaacacacagtaaaa |
| | | tgaggaaatacaatagttttttcaatatagtaccacaagccattttttctgtaaaggacc |
| | | aaatattagatactatcacaaaacattttatcactcattcaaaacaagaatcattcagtt |
| | | gccccaggaaaaaacacactgaaattattttagatagcataataagctagaggatat |
| | | agaacatttgaaaaacagttccaaaaaatggaatactaaagatgcaacattaattctt |
| | | agtacatttgttatggtaatgaattaaagcattatagaatatattcaagtcagaaatcct |
| | | gtagtatgaagacataccttcatatgtgaaaatattattttatattaataataattattctg |
| | | gtatttatatcagatttatcatcagattttctttcctgaatttattaataatttgaccatggaa |
| | | cacaaaaatatttcattcattttataatactttg |
| AW510657 | 9 | tttgatatcattaaagtttattcaagaattgtttgacagacaacccttttaggtaagga |
| | | aaaaagtaactactgaagaacaaagaaagttccaagagggaattaactctagttc |
| | | tacaaattcaggactatacagtgacgattaggagctgagttcatgccttttagaact |
| | | aattacaattgttcgtaagtacgagtttaacataaatctacagctcttttctagagtac |
| | | aatagtaactaaaatagctggttttacatgacaggaaacacaatgtcctttgtaaca |
| | | ggtaaatactaaaaaagtacaattttttcctttttttccctcatataaatacataatgta |
| | | gggggataaataatacaaaaaagaaaatattttaacaggctataaccaataaatat |
| | | atatgaaaatgttcactagaacacacgcttttttgagcaatgctggacttctgcagg |
| | | cccagacatctctcacagttgtttttacatccattaaaatgtaaattctaagtgcaac |
| | | aaaagtgtcctgtcag |
| AW517716 | 10 | ttacgttttatttttatttatttactttttttagagatggagtctcactctgttgccaggctgg |
| | | agtgcagcggtgtgatcttggctcactgcaacttccgccccctgggttcaagtgattc |
| | | tcctgcctcagccttccaagtagctgggattacaggcatgcaccaccacacctggc |
| | | aatttttgtatctttagtagagacggggtttcaccatgttggccaggatggtcttgatct |
| | | cttgacctggtgatctgcctgcctcagcctcccaaagtgctgggatacaggtgtgag |
| | | ccaccgtgcctggcctatgtatttttttttttaaacacacacataaatctaaagcaaagg |
| | | gtatgccaagattcagctggggccaggtctgacccccactctgagcatctcattagc |
| | | ttcccatcagtggaatacaatggagacatattccacttggtctggcaatgtcctcc |
| B2-bradykinin | 11 | X86163; Sequence below. |
| receptor | | |
| (BDKRB2) | | |

cagattcacaaactgcaggactgggcagggagcagacagtgagcaaacgccagcagggctgctgtgaatttgtgtaaggattgagggacag
ttgcttttcagcatgggcccaggaatgccaaggagacatctatgcacgaccttgggaaatgagttgatgtctccggtaaaacaccggagactaa
ttcctgccctgcccaattttgcagggagcatggctgtgaggatggggtgaactcacgcacagccaaggactccaaaatcacaacagcattact
gttcttatttgctgccacacctgagccagcctgctccttcccaggagtggaggaggcctggggggagggagaggagtgactgagcttccctcc
cgtgtgttctccgtccctgccccagcaagacaacttagatctccaggagaactgccatccagctttggtgcaatggctgagtgcacaagtgagtt
gttgccctgggtttctttaatctattcagctagaactttgaaggacaatttcttgcattaataaaggttaagccctgaggggtccctgataacaacct
ggagaccaggattttatggctcccctcactgatggacaaggaggtctgtgccaaagaagaatccaataagcacatattgagcacttgctgtatat
gcagtattgagcactgtaggcaagacccaagaaagagaaggagccatctccatcttgaaggaactcaaagactcaagtgggaacgactggg
cactgccaccaccagaaagctgttcgacgagacggtcgagcagggtgctgtgggtgatatggacagcagaagggggagaccaaggttcca
gctcaaccaataactattgcacaaccacctgtccctgcctcagttcccttttatgtaacatgaagtcgttgtgagggttaaaggcagtaacaggtat
aaagtacttagaaaagcaaagggtgctacgtacatgtgaggcatcattacgcagacgtaactgggatatgtttactataaggaaaagacactga
ggtctagaaatagctccgtggagcagaatcagtattgggagccggtggcggtgtgaagcaccagtgtctggcacacagtaggtgctcattgg
ctcccttccacctgtcattcccaccaccctgaggccccaaccgccacacacacaggagcatttggagagaaggccatgtcttcaaagtctgattt
gtgatgaggcagaggaagatatttctaatcggtcttgcccagaggatcacagtgctgagaccccccaccaccagccggtacctgggaagggg
gagagtgcaggcctgctcagggactgttcctgtctcagcaaccaagggattgttcctgtcaatcaatggtttattggaaggtggcccagtatgag
ccctagaagagtgtgaaaaggaatggcaatggtgttcaccatcggcagtgccagggcagcactcattcacttgataaatgaatatttattagctg
gttggagagctagaacctggagagctagaacctggagaactagaacctggagggctagaacctggagaggctagaaccaagaagggctag
aacctggaggggctagaacctagagaagctaaaacctgagctagaagctggaggactagaacctggagggctggaatctgaagggctaga
acctggagggctggaatctggagagctagaacctggagggctagaacctggagggctagaacctagaagggctagaacctggagggctg
gaatctggagagctagaacctggagggctagaacctggagggctagaacctagaagggctagaacctggagggctagaacctggcaggtt
agaacctagaagggctagaacctggagagccagaacctggagggctagaacctggaagggctagaacctgtagagctagaacatggaga
gctagaacccggcaggctagaacctggcaagctagaacctggagggaatgaacctggagggctagaacctggagaatgagaaaaatttaca
tggcaaagagcccataaatcctgaccaatccaactctgaattttaaagcaaaagcgtgaaaaaaaagattccctccttacccccaacccactcttt
tttcccaccacccactctcctctgcctcagtaagtatctggaggaagaaaacaggtgaaagaagaagtaaaaaccatttagtattagtattagaat
gaagtcaaactgtgccacacatggtgaatgaaaaaaaaaaaaaagaggctgtgttttgtcacacagggcagtcattcagcaccagagcacgtg
atggtctgagactctcttaggagcagagctctgccgcaatggccatgtggggatccacacctggtctgaggggcaactgagtctgcgggaga
agagcggccctatgcatggtgtagatgccctgataaagaacatctgtcctgtgaaagactcaatgagctgttatgttgtaaacaggaagcattttc
acatccaaacgagaaaatcatgtaaacatgtgtcttttctgtagagcataataaatggatgaggtttttgcaaaaaaaaaaaaaaaaa

| | | |
|---|---|---|
| C6orf37 | 12 | AF350451; Sequence below |

attttccccgcacaactgctaaagctccagagacacgagcgtgtgtggcagcaagagccgccagttcgggaccaccgcagctggggtggca
gcggcgcaggaggggtcgcggggagggagtggtgagcgcaggcggcaggggtctgggaaagacgaagtcgctatttgctgtctgagcg
cgctcgcagctcctggaagtgttgccgcctctcggtttgtctcgcctgctgcgctcctagaagggcggccgcctccaggactgaccagggcca
agtggcgctcggcgggcactacatggcggagggtgaagggtacttcgccatgtctgaggacgagctggcctgcagcccctacatcccccta
ggcggcgacttcggcggcggcgacttcggcggcggcgacttcggcggcggcggcacgttcggtgggcattgcttggactattgcgaaagc
cctacggcgcactgcaatgtgctgaactgggagcaagtgcagcggctggacggcatcctgagcgagaccattccgattcacgggcgcggca
acttccccacgctcgagctgcagccgagcctgatcgtgaaggtggtgcggcggcgcctggccgagaagcgcattggcgtccgcgacgtgc
gcctcaacggctcggcagccagccatgtcctgcaccaggacagcggcctgggctacaaggacctggacctcatcttctcggccgacctgcg
cggggaaggggagtttcagactgtgaaggacgtcgtgctggactgcctgttggacttcttacccgagggggtgaacaaagagaagatcacac
cactcacgctcaaggaagcttatgtgcagaaaatggttaaagtgtgcaatgactctgaccgatggagtcttatatccctgtcaaacaacagtggc
aaaaatgtggaactgaaatttgtggattccctccggaggcagtttgaattcagtgtagattcttttcaaatcaaattagactctctctgctcttttatga
atgttcagagaacccaatgactgagacatttcaccccacaataatcggggagagcgtctatggcgatttccaggaagcctttgatcacctttgtaa
caagatcattgccaccaggaacccagaggaaatccgagggggaggcctgcttaagtactgcaacctcttggtgaggggctttaggcccgcct
ctgatgaaatcaagacccttcaaaggtatatgtgttccaggtttttcatcgacttctcagacattggagagcagcagagaaaactggagtcctattt
gcagaaccactttgtgggattggaagaccgcaagtatgagtatctcatgacccttcatggagtggtaaatgagagcacagtgtgcctgatggga
catgaaagaagacagactttaaaccttatcaccatgctggctatccgggtgttagctgaccaaaatgtcattcctaatgtggctaatgtcacttgct
attaccagccagccccctatgtagcagatgccaactttagcaattactacattgcacaggttcagccagtattcacgtgccagcaacagacctac
tccacttggctaccctgcaattaagaatcatttaaaaatgtcctgtggggaagccatttcagacaagacaggagagaaaaaaaaaaaaaagaaa
aaaaaaagagtgatccagcccttattagggatgtgttttgtgcaatgatgatatgctcctggttttaagtttggcaaagcttatgtatcttttaatagat
gtgggagcatgatctcgaaaggatccttttcccttctcttattctcctacccaattggattctatcctgcaaaaaaagagagacctgtcattagaagc
aaccaggttctcctgatacaagagaagaaatgtgtgatgacaatatgggtttgctgtatctgctcccatagctttgccataggaaaaaaaaaagtg
gaaagtttcttttaagatggaattcataaaagggaaaatacggaggaaaaaaggtctcactccaacttgtgaatcagtttaggagttcagatattaa
tagtaacaatacaggaaaaaggggaactccaacgttgggattactgtctgaggcttgtagcaagtgctttctgtggaatgatcttgttttgctaaca
aacggcttgctccaaatgaacagtagtaggttggtgcagttctcgtaacaatcagcagaacttatgatgacacaatccattaattccagctgcgtg
catagatcacatttttaaaatgtaaaaatgcaagcaaaaacagctgtaacaaagaaagtgtgctcaaggaccaaagatttaacagataaaaatac
ccaattagaagagatatagtagactatatgaagagagattatatttgttacacaccaatatacatcaaagtgcctgttgccttctgaaaatttgaagt
ggcaaaattattttatggtttaatgattattttattttatcagggactgcctcaagaagaaaataacataagcttgtgaatggtggagaaaatgcccta
ttttttcttgcaaatacttgtataaagttaacatttgttgatctgatattatcataggtacatgtgtatgtgtgtataaattatatgtgtgtgtgtatatata
cattttatatatacattttatatgtatatatacacagtagattgactatgatctagaataatgtctcaaataggaaatgtttaaatactgtgtgtttttatgt
tttcaacaggataacatgagacgtgggcatattgcaatgatgaattaaatccacatctaaaaaaattaaatgaaggagggaaccaagtaatatatttcat
aggaagagcagaaattatactgttttagtgggatttttttttctttttttttttttctttggtgagccataaaattccacaaatgggagaatatttgtttggc
agagcactcttttttatattgaactgccattttgacagtggaacccatttattaaaaaaaaaattgcattcctctatgatgtttaatctagtggatcatgg
atcagtaataggctacttaaatccctgactgctaaaaaggatttccggtgatctaaacactacttgctaatgtttaaatgaattttaatgaatgcattct
gcatttctggaccactagaatttagtaatgtgaaatgaccctttttacagaatatttgcacaattgcttaaaatttatatatgagatatatattatatataa
cattttataaatcatgtcaatatgaaacatctttgatctggttgtcacactgcatttaaatatttagtactgtactttaaatcgctttccattaaatcaaatc
caactttattttctttcttacaaaaataccagttatacctttgtgaaatgaactggcattactatttcagttcaataacagctaatcctaaaaccacccttt
ctcctagccagtagttcctctagatactggtctctgaaaatgcatttgttaaaaacaaaacaaaactaacacataagaaccttccctttgtgttgtga
aacaaccacataatctccacaaccttagtggatgactgcttgctatgataattcctcgaagacccaattagaagattttcatcatcagttaaagaga
gaccacgggagaaaaaaatatcctcctgttggcagtataatttgtttgtttgtttatctagggatcctcagatgcttagtgctaggttaatccaggtta
atccgtctggactaccttttgtgcatctttctttgaagccttaatgggaacctgatgggtttgctgtagcagcttccttgtgaattctgtcagagctgca
acagccgctgcactgccactcagttttctaaggaactcctcctactaccatcttggctcagtctccctcacttaagccctgggtttgaaaaattaatt
gcaacttcccaggaaacattgttcagtttgcagattaagcctggcactcacctatcagaaaccagagctccgcctgcttagttgtttcaaagttttct
gaaagaaaactaggggagcacttgtgaacacaggagcagctggtgatctgctttcttaccctaactcttgacaaatgagtcgtctactattttaaa
gagtctggaggtctctgactctgccataacaataacctgctgttaatttataacacagatttttgtttggaagagccttatttgaaatacactttgattta
ttttcttaaatatttatattcttttcttgcttacttcagggttggtagcttagttggaagtgccagcactggcacctattcatatagaacaggctgtactc
aagacaacttctagcatttactttaagacttatataatttatttctattttgtgtgtactatagtcttgtgcatatgtagttgaacacacagtgaaatatatg
tctctctttgtggatgtgcggcctaaaaatttgaatgtctggtgagagagagccatgtgtataggtcagagaaaagaacagctcccgactccctat
tagcgcctgtgatttgtttccttttgtgtttatctggcctagtgtgctgtttctttaaaccaggaagaagttttgtcttttggaggctcttctcacctgtcca
gcctggcatgtcagagaacacatagcctgtgacaatgccgtttttaaaggtttacttaatttgcagtaaatccagctgcctcaagaactcctacacc
aagatggacatttcctttccagaaatgggatcaagtatctgctcactttggtattggatggactaataatgtagctccaaaaatgcaaggatggaa
gaatatgtgtaatccaaaccaaggaaggaaatgaaaagtgaacgtactgtttttaccacccctttctgtttgcttattgttggttgcttcactgtgcat
aaagttgttttcaatgcaacgcttgttaaataaatattgtgaactattttgtaaatgaaatgtattatgttgaaagctgtcagttcaaaaataagctttttt
gttgttgttgaagatgaagtgtgttaggtgaaaccaaaaagccaaaaaaagtaatttcatatatagcatctatttgaatataatctttctttaaaatttct
tttagcatagcattttcagtgctaagaaagaatctctatgttatattttgttaaaataatggctttctaacaaagcaaatggtaaagtacaaagttggaa
gatgtcaagttaacgagacttgctgcaaagccttgcagaacggaggaggctcgcctgctggctgtctctccctccaacctctctacaatcatgcc
tgctttgaggtgttctgttgcagcaagctgcaccttgggtcactcttttggaatattttgactataggctgcgtcacaggcagaaaaggagttgatg
gaaaatggactaaaaaactgacatgtttgaatcagtgctagagggaacagattgtgaattttgtttacagcatccaatatttggatttttttgtaaata
aaaaagttatttttttctattg

| | | |
|---|---|---|
| C6orf55 | 13 | BC022536 |
| | | NM_016485 |
| | | AF271994 |
| C6orf69 | 14 | BC023525 |
| | | BC035879 |
| C7orf32 | 15 | BC015899, AF452639, NM_145230, AK057700, |
| | | AK094602, AK098362, AK172725, BX640846 |
| C11orf8 | 16 | NM_001584, U57911 |
| CD24 antigen | 17 | BC064619, AK026603, BC007674, NM_013230, |
| | | AK125531, D87667, L33930 |
| CDP- | 18 | NM_001263 |
| diacylglycerol | | U60808 |
| synthase | | U65887 |
| (CDS1) | | |
| centaurin, alpha | 19 | NM_018404 |
| 2 (CENTA2) | | AJ272195 |
| claudin 1 | 20 | NM_021101, AF086514, AF101051 |
| (CLDN1) | | |
| collagen, type | 21 | NM_001854 |
| XI, alpha 1 | | NM_080629 |
| (COL11A1) | | NM_080630 |
| | | AB208844 |
| collagen, type | 22 | NM_001855; Sequence below |
| XV, alpha 1 | | |
| (COL15A1) | | |

ttctgcccgccgccgccgctgccgagcgccgcctttgttccctgcaggaagggcgagcgcgcgggccagcgctcagccagcgcctcacga
cccttcgtcctccgctaagctccaacgctctgctcgactagccgcgcgccttccggggctccgcagacccgcgagatggcaccaaggagga
acaacgggcagtgctggtgtctgctgatgctgctctcggtctccacgcccctccctgctgtcacccagacccgcggtgcgacagagactgctt
cccagggtcacctggacctcacgcagctcatcggtgtcccgctgccctcgtccgtatcctttgtcacaggctatggtggcttcccggcctacagt
ttcgggcctggtgccaatgttggccgcccagccaggactctcatcccatccaccttcttcagggacttcgccatcagggtcgtggtgaagccca
gcagcacccgtggtggcgtgctcttcgccatcactgacgccttccagaaggtcatctacctgggcctgcggctctcaggtgtggaggacggc
caccagcggatcatcctctactacacggagccaggctcccatgtgtcccaagaagctgctgccttctcggtgcctgtgatgacccacaggtgg
aaccgcttcgccatgattgtccagggtgaggaagtgaccctcctcgtgaactgtgaggagcacagccgcatccccttccagcggtcctcccag
gctttggcttttgagtccagcgctggaatcttcatgggcaatgcaggagctacagggctcgagagattcactggctccctccagcagctcaccg
tgcaccccgaccccaggactcccgaggagctgtgtgaccctgaagagtcctcggcatctggagagaccagtgggctgcaggaggcagacg
gagtagctgagatcttagaagccgtcacctacactcaagcctcgcccaaagaagcaaaagttgaacccataaacacacctccaactccatcct
ccccctttgaagacatggaactttctggtgaacctgtacccgaggggaccctggaaaccaccaacatgagcatcatccagcacagcagcccc
aaacaagggtctggtgagatcctgaatgacacactggagggggttcattctgtggatggtgaccccattactgacagcggctcaggggctgg
ggccttccttgacattgctgaagaaaagaatttagcagcaacagcagcggggctggccgaggtgcccatcagcactgctggagaagcagag
gccagcagtgtgcccaccgggggaccaaccctctctatgtccacggagaacccagaggaaggggtcactccaggtccagataatgaagag
cgtttacgagcaacagcagcaggggaggccgaggcactcgccagcatgcctggggaagtggaggccagtggtgtggcccccggggagct
ggacctctccatgtccgcccagagcctcggggaagaggccactgtgggtccaagcagtgaagacagtttaacaacagctgcagctgcaacc
gaagtgtccctcagtacttttgaggatgaggaagccagtggggtccccacagatggcctggctcccctcacagccaccatggcccctgagcg
ggcagtcacttctggtcctggtgatgaagaagacttggcagcagccacaacagaggagcccctcatcacagctgggggtgaagagtccggc
agccctccccctgatgggccaccgctgcccctgcccacagtggctcctgaaagatggatcactccagctcaaagagaacatgtgggaatgaa
aggacaggctgggcccaaaggagaaaagggtgatgctggggaggagcttcctggccctcctgaaccttctgggcctgttggacccacggca
ggagcagaagcagagggctctggcctaggctggggctcggacgtcggctctggctctggtgacctggtgggcagtgagcagctgctgaga
ggtcctccaggacccccagggccacctggcttacctgggattccaggaaaaccaggaactgatgttttcatgggaccccctggatctcctgga
gaggatggacctgctggtgaacctgggcccccgggccctgagggacagcctggagttgatggagccaccggccttcccgggatgaaagg
ggagaagggagcaagagggcctaatggctcagttggtgaaaagggtgaccctggcaacagaggcttacctggacccccggggaaaaagg
gacaagctggccctcctggggtcatgggacccccagggcctcctggaccccctgggcccccaggccctggatgcacaatgggacttggatt
cgaggataccgaaggctctggaagcacccagctattgaatgaacccaaactctccagaccaacggctgcaattggtctcaaaggagagaaag
gagaccggggacccaagggagaaagggggatggatggagccagtattgtgggaccccctgggccgagagggccacctgggcacatcaa
ggtcttgtctaattccttgatcaatatcacccatggattcatgaatttctcggacattcctgagctggtggggcctccggggccggacgggttgcct
gggctgccaggatttccaggtcctagaggaccaaaaggtgacactggtttacctggctttccaggactaaaaggagaacagggcgagaagg
gagagccgggtgccatcctgacagaggacattcctctggaaaggctgatggggaaaaagggtgaacctggaatgcatggagccccaggac
caatggggcccaaaggaccaccaggacataaaggagaatttggccttcccgggcgacctggtcgcccaggactgaatggcctcaagggtac
caaaggagatccaggggtcattatgcagggcccacctggcttacctggccctccaggcccccctgggccacctggagctgtgattaacatca
aaggagccattttcccaatacccgtccgaccacactgcaaaatgccagttgatactgctcatcctgggagtccagagctcatcacttttcacggt
gttaaaggagagaaaggatcctggggtcttcctggctcaaagggagaaaaaggcgaccagggagcccagggaccaccaggtcctccactt
gatctagcttacctgagacactttctgaacaacttgaagggggagaatggagacaaggggttcaaaggtgaaaaaggagaaaaaggagacat
taatggcagcttccttatgtctgggcctccaggcctgcccggaaatccaggcccggctggccaaaaaggggagacagtcgttgggccccaag
gacccccaggtgctcctggtctgcctgggccacctggctttggaagacctggtgatcctgggccaccggggcccccggggccaccaggacc
tccagctatcctgggagcagctgtggcccttccaggtccccctggccctccaggacagccagggcttcccggatccagaaacctggtcacag
cattcagcaacatggatgacatgctgcagaaagcgcatttggttatagaaggaacattcatctacctgagggacagcactgagtttttcattcgtg
ttagagatggctggaaaaaattacagctgggagaactgatccccattcctgccgacagccctccaccccctgcgctttccagcaacccacatca
gcttctgcctccaccaaaccctatttcaagtgccaattatgagaagcctgctctgcatttggctgctctgaacatgccattttctggggacattcga
gctgattttcagtgcttcaagcaggccagagctgcaggactgttgtccacctaccgagcattcttatcttcccatttgcaagatctgtccaccattgt
gaggaaagcagagagatacagccttcccatagtgaacctcaagggccaagtactttttaataattgggactcaattttttctggccacggaggtc
agttcaatatgcatattccaatatactcctttgatggtcgagacataatgacagatccttcttggccccagaaagtcatttggcatggctccagccc
ccatggcgtccgccttgtggataactactgtgaagcatggcgaaccgcggacacagcggtcacgggacttgcctccccgctgagcacgggg
aagattctggaccagaaagcatacagctgtgctaatcggctaattgtcctatgtatcgaaaacagtttcatgacagacgctaggaagtaatggcc
ttctgatgattcttaaagagttttcaattttttcttatgtgaagagttgacactgaaatctaaaatgtttaattgttgtaaatattacagttttttttttttt
actacatattctttacaacagcaaccaaagaaaacatacctcaatacactcaaaactgaagacatagaggactcagatcaaagacaaaatctgatccat
atattggtgctagattctgcaggaaaccccagcagtgtgaacgcatcccaacataggttaagagcaagttgaaaacaaaggccagattctgcca
ctgcatccttcagacagttatatcctccttttaaaccattgttgttgagtgtaagatgtccttcatgttttcttataaagtcatgttttagaaatgttaccct
ttctaagttatatacagatcaaatgcttttttctttcacgtacatccatcatttgcaactgctgttcgtacacagaaacaggactgctcaaatgatcctat
ttgtattttctgatgctatcagactcaatgtttttttccctaaaatattattgccatcatgctttaggaatttttatatttttacacaatcatattttagtat
ggtgtctgtttatgtaactctgacttgctggaaaagttgaaactccaaataatctgaaactagaaaagaaatagcacataattactaccttccccttggcg
gctctcctcccccaacccccaccccacaattttatgacttccatttggcaattgttgaattataactgcgactgaaacaaacaggttcatagagatg
aattttctgaaaacatatatctacatgttgtataattggattttttttccatgtaagtgaacataaaaacatcttttccggg

| | | |
|---|---|---|
| collagen, type | 23 | NM_152888 |
| XXII, alpha 1 | | AF406780 |
| (COL22A1) | | BC042075 |
| chondroitin | 24 | NM_004385; Sequence below |
| sulfate | | |
| proteoglycan 2 | | |
| (CSPG2) | | |

gctgccccgagcctttctggggaagaactccaggcgtgcggacgcaacagccgagaacattaggtgttgtggacaggagctgggaccaag
atcttcggccagccccgcatcctcccgcatcttccagcaccgtcccgcaccctccgcatccttccccgggccaccacgcttcctatgtgacccg
cctgggcaacgccgaacccagtcgcgcagcgctgcagtgaattttccccccaaactgcaataagccgccttccaaggccaagatgttcataaa
tataaagagcatcttatggatgtgttcaaccttaatagtaacccatgcgctacataaagtcaaagtgggaaaaagcccaccggtgaggggctcc
ctctctggaaaagtcagcctaccttgtcatttttcaacgatgcctactttgccacccagttacaacaccagtgaatttctccgcatcaaatggtctaa
gattgaagtggacaaaaatggaaaagatttgaaagagactactgtccttgtggcccaaaatggaaatatcaagattggtcaggactacaaaggg
agagtgtctgtgcccacacatcccgaggctgtgggcgatgcctccctcactgtggtcaagctgctggcaagtgatgcgggtctttaccgctgtg
acgtcatgtacgggattgaagacacacaagacacggtgtcactgactgtggatggggttgtgtttcactacagggcggcaaccagcaggtaca
cactgaattttgaggctgctcagaaggcttgtttggacgttggggcagtcatagcaactccagagcagctctttgctgcctatgaagatggatttg
agcagtgtgacgcaggctggctggctgatcagactgtcagatatcccatccgggctcccagagtaggctgttatggagataagatgggaaag
gcaggagtcaggacttatggattccgttctccccaggaaacttacgatgtgtattgttatgtggatcatctggatggtgatgtgttccacctcactgt
ccccagtaaattcaccttcgaggaggctgcaaaagagtgtgaaaaccaggatgccaggctggcaacagtgggggaactccaggcggcatg
gaggaacggctttgaccagtgcgattacgggtggctgtcggatgccagcgtgcgccaccctgtgactgtggccagggcccagtgtggaggt
ggtctacttggggtgagaaccctgtatcgttttgagaaccagacaggcttccctccccctgatagcagatttgatgcctactgctttaaacctaaa
gaggctacaaccatcgatttgagtatcctcgcagaaactgcatcacccagtttatccaaagaaccacaaatggtttctgatagaactacaccaatc
atccctttagttgatgaattacctgtcattccaacagagttccctcccgtgggaaatattgtcagttttgaacagaaagccacagtccaacctcagg
ctatcacagatagtttagccaccaaattacccacacctactggcagtaccaagaagccctgggatatggatgactactcaccttctgcttcagga
cctcttggaaagctagacatatcagaaattaaggaagaagtgctccagagtacaactggcgtctctcattatgctacggattcatgggatggtgt
cgtggaagataaacaaacacaagaatcggttacacagattgaacaaatagaagtgggtcctttggtaacatctatggaaatcttaaagcacattc
cttccaaggaattccctgtaactgaaacaccattggtaactgcaagaatgatcctggaatccaaaactgaaaagaaaatggtaagcactgtttctg
aattggtaaccacaggtcactatggattcaccttgggagaagaggatgatgaagacagaacacttacagttggatctgatgagagcaccttgat
ctttgaccaaattcctgaagtcattacggtgtcaaagacttcagaagacaccatccacactcatttagaagacttggagtcagtctcagcatccac
aactgtttcccctttaattatgcctgataataatggatcatccatggatgactgggaagagagacaaactagtggtaggataacggaagagtttctt
ggcaaatatctgtctactacaccttttccatcacagcatcgtacagaaatagaattgtttccttattctggtgataaaatattagtagagggaatttcc
acagttatttatccttctctacaaacagaaatgacacatagaagagaaagaacagaaacactaataccagagatgagaacagatacttatacaga
tgaaatacaagaagagatcactaaaagtccatttatgggaaaaacagaagaagaagtcttctctgggatgaaactctctacatctctctcagagc
caattcatgttacagagtcttctgtggaaatgaccaagtcttttgatttcccaacattgataacaaagttaagtgcagagccaacagaagtaagaga
tatggaggaagactttacagcaactccaggtactacaaaatatgatgaaaatattacaacagtgcttttggcccatggtactttaagtgttgaagca
gccactgtatcaaaatggtcatgggatgaagataatacaacatccaagcctttagagtctacagaaccttcagcctcttcaaaattgccccctgcc
ttactcacaactgtggggatgaatggaaaggataaagacatcccaagtttcactgaagatggagcagatgaatttactcttattccagatagtact
caaaagcagttagaggaggttactgatgaagacatagcagcccatggaaaattcacaattagatttcagccaactacatcaactggtattgcaga
aaagtcaactttgagagattctacaactgaagaaaaagttccacctatcacaagcactgaaggccaagtttatgcaaccatggaaggaagtgctt
tgggtgaagtagaagatgtggacctctctaagccagtatctactgttccccaatttgcacacacttcagaggtggaaggattagcatttgttagtta
tagtagcacccaagagcctactacttatgtagactcttcccataccattcctctttctgtaattcccaagacagactggggagtgttagtaccttctgt
tccatcagaagatgaagttctaggtgaaccctctcaagacatacttgtcattgatcagactcgccttgaagcgactatttctccagaaactatgaga
acaacaaaaatcacagagggaacaactcaggaagaattcccttggaaagaacagactgcagagaaaccagttcctgctctcagttctacagct
tggactcccaaggaggcagtaacaccactggatgaacaagagggcgatggatcagcatatacagtctctgaagatgaattgttgacaggttct
gagagggtcccagttttagaaacaactccagttggaaaaattgatcacagtgtgtcttatccaccaggtgctgtaactgagcacaaagtgaaaac
agatgaagtggtaacactaacaccacgcattgggccaaaagtatctttaagtccagggcctgaacaaaaatatgaaacagaaggtagtagtac
aacaggatttacatcatctttgagtccttttagtacccacattacccagcttatggaagaaaccactactgagaaaacatccctagaggatattgatt
taggctcaggattatttgaaaagcccaaagccacagaactcatagaattttcaacaatcaaagtcacagttccaagtgatattaccactgccttca
gttcagtagacagacttcacacaacttcagcattcaagccatcttccgcgatcactaagaaaccacctctcatcgacagggaacctggtgaaga
aacaaccagtgacatggtaatcattggagaatcaacatctcatgttcctcccactacccttgaagatattgtagccaaggaaacagaaaccgata
ttgatagagagtatttcacgacttcaagtcctcctgctacacagccaacaagaccacccactgtggaagacaaagaggcctttggacctcaggc
gctttctacgccacagcccccagcaagcacaaaatttcaccctgacattaatgtttatattattgaggtcagagaaaataagacaggtcgaatgag
tgatttgagtgtaattggtcatccaatagattcagaatctaaagaagatgaaccttgtagtgaagaaacagatccagtgcatgatctaatggctga
aattttacctgaattccctgacataattgaaatagacctataccacagtgaagaaaatgaagaagaagaagaagagtgtgcaaatgctactgatg
tgacaaccaccccatctgtgcagtacataaatgggaagcatctcgttaccactgtgcccaaggacccagaagctgcagaagctaggcgtggc
cagtttgaaagtgttgcaccttctcagaatttctcggacagctctgaaagtgatactcatccatttgtaatagccaaaacggaattgtctactgctgt
gcaacctaatgaatctacagaaacaactgagtctcttgaagttacatggaagcctgagacttaccctgaaacatcagaacatttttcaggtggtga
gcctgatgttttccccacagtcccattccatgaggaatttgaaagtggaacagccaaaaaaggggcagaatcagtcacagagagagatactga
agttggtcatcaggcacatgaacatactgaacctgtatctctgtttcctgaagagtcttcaggagagattgccattgaccaagaatctcagaaaat
agcctttgcaagggctacagaagtaacatttggtgaagaggtagaaaaaagtacttctgtcacatacactcccactatagttccaagttctgcatc
agcatatgtttcagaggaagaagcagttaccctaataggaaatccttggccagatgacctgttgtctaccaaagaaagctgggtagaagcaact
cctagacaagttgtagagctctcagggagttcttcgattccaattacagaaggctctggagaagcagaagaagatgaagatacaatgttcaccat
ggtaactgatttatcacagagaaatactactgatacactcattactttagacactagcaggataatcacagaaagcttttttgaggttcctgcaacca
ccatttatccagtttctgaacaaccttctgcaaaagtggtgcctaccaagtttgtaagtgaaacagacacttctgagtggatttccagtaccactgtt
gaggaaaagaaaaggaaggaggaggagggaactacaggtacggcttctacatttgaggtatattcatctacacagagatcggatcaattaattt
taccctttgaattagaaagtccaaatgtagctacatctagtgattcaggtaccaggaaaagttttatgtccttgacaacaccaacacagtctgaaag
ggaaatgacagattctactcctgtctttacagaaacaaatacattagaaaatttgggggcacagaccactgagcacagcagtatccatcaacctg
gggttcaggaagggctgaccactctcccacgtagtcctgcctctgtctttatggagcagggctctggagaagctgctgccgacccagaaacca
ccactgtttcttcattttcattaaacgtagagtatgcaattcaagccgaaaaggaagtagctggcactttgtctccgcatgtggaaactacattctcc
actgagccaacaggactggttttgagtacagtaatggacagagtagttgctgaaaatataacccaaacatccagggaaatagtgatttcagagc
gattaggagaaccaaattatggggcagaaataaggggcttttccacaggttttcctttggaggaagatttcagtggtgactttagagaatactcaa
cagtgtctcatcccatagcaaaagaagaaacggtaatgatggaaggctctggagatgcagcatttagggacacccagacttcaccatctacagt
acctacttcagttcacatcagtcacatatctgactcagaaggacccagtagcaccatggtcagcacttcagccttcccctgggaagagtttacatc
ctcagctgagggctcaggtgagcaactggtcacagtcagcagctctgttgttccagtgcttcccagtgctgtgcaaaagttttctggtacagcttc
ctccattatcgacgaaggattgggagaagtgggtactgtcaatgaaattgatagaagatccaccattttaccaacagcagaagtggaaggtacg
aaagctccagtagagaaggaggaagtaaaggtcagtggcacagtttcaacaaactttccccaaactatagagccagccaaattatggtctagg
caagaagtcaaccctgtaagacaagaaattgaaagtgaaacaacatcagaggaacaaattcaagaagaaaagtcatttgaatcccctcaaaac
tctcctgcaacagaacaaacaatctttgattcacagacatttactgaaactgaactcaaaaccacagattattctgtactaacaacaaagaaaactt
acagtgatgataaagaaatgaaggaggaagacacttctttagttaacatgtctactccagatccagatgcaaatggcttggaatcttacacaactc
tccctgaagctactgaaaagtcacattttttcttagctactgcattagtaactgaatctataccagctgaacatgtagtcacagattcaccaatcaaa
aaggaagaaagtacaaaacattttccgaaaggcatgagaccaacaattcaagagtcagatactgagctcttattctctggactgggatcaggag
aagaagttttacctactctaccaacagagtcagtgaattttactgaagtggaacaaatcaataacacattatatccccacacttctcaagtggaaag
tacctcaagtgacaaaattgaagactttaacagaatggaaaatgtggcaaaagaagttggaccactcgtatctcaaacagacatctttgaaggta
gtgggtcagtaaccagcacaacattaatagaaattttaagtgacactggagcagaaggacccacggtggcacctctccctttctccacggacat
cggacatcctcaaaatcagactgtcaggtgggcagaagaaatccagactagtagaccacaaaccataactgaacaagactctaacaagaattc
ttcaacagcagaaattaacgaaacaacaacctcatctactgattttctggctagagcttatggttttgaaatggccaaagaatttgttacatcagcac
caaaaccatctgacttgtattatgaaccttctggagaaggatctggagaagtggatattgttgattcatttcacacttctgcaactactcaggcaacc
agacaagaaagcagcaccacatttgtttctgatgggtccctggaaaaacatcctgaggtgccaagcgctaaagctgttactgctgatggattccc
aacagtttcagtgatgctgcctcttcattcagagcagaacaaaagctcccctgatccaactagcacactgtcaaatacagtgtcatatgagaggtc
cacagacggtagtttccaagaccgtttcagggaattcgaggattccaccttaaaacctaacagaaaaaaacccactgaaaatattatcatagacc
tggacaaagaggacaaggatttaatattgacaattacagagagtaccatccttgaaattctacctgagctgacatcggataaaaatactatcatag
atattgatcatactaaacctgtgtatgaagacattcttggaatgcaaacagatatagatacagaggtaccatcagaaccacatgacagtaatgatg
aaagtaatgatgacagcactcaagttcaagagatctatgaggcagctgtcaacctttctttaactgaggaaacatttgagggctctgctgatgttct
ggctagctacactcaggcaacacatgatgaatcaatgacttatgaagatagaagccaactagatcacatgggctttcacttcacaactgggatcc
ctgctcctagcacagaaacagaattagacgttttacttcccacggcaacatccctgccaattcctcgtaagtctgccacagttattccagagattga
aggaataaaagctgaagcaaaagccctggatgacatgtttgaatcaagcactttgtctgatggtcaagctattgcagaccaaagtgaaataatac
caacattgggccaatttgaaaggactcaggaggagtatgaagacaaaaaacatgctggtccttcttttcagccagaattctcttcaggagctgag
gaggcattagtagaccatactccctatctaagtattgctactacccaccttatggatcagagtgtaacagaggtgcctgatgtgatggaaggatcc
aatcccccatattacactgatacaacattagcagtttcaacatttgcgaagttgtcttctcagacaccatcatctcccctcactatctactcaggcagt
gaagcctctggacacacagagatcccccagcccagtgctctgccaggaatagacgtcggctcatctgtaatgtccccacaggattcttttaagg
aaattcatgtaaatattgaagcaactttcaaaccatcaagtgaggaataccttcacataactgagcctccctctttatctcctgacacaaaattagaa
ccttcagaagatgatggtaaacctgagttattagaagaaatggaagcttctcccacagaacttattgctgtggaaggaactgagattctccaagat
ttccaaaacaaaaccgatggtcaagtttctggagaagcaatcaagatgtttcccaccattaaaacacctgaggctggaactgttattacaactgcc
gatgaaattgaattagaaggtgctacacagtggccacactctacttctgcttctgccacctatggggtcgaggcaggtgtggtgccttggctaag
tccacagacttctgagaggcccacgctttcttcttctccagaaataaaccctgaaactcaagcagctttaatcagagggcaggattccacgatag
cagcatcagaacagcaagtggcagcgagaattcttgattccaatgatcaggcaacagtaaaccctgtggaatttaatactgaggttgcaacacc
accattttcccttctggagacttctaatgaaacagatttcctgattggcattaatgaagagtcagtggaaggcacggcaatctatttaccaggacct
gatcgctgcaaaatgaacccgtgccttaacggaggcacctgttatcctactgaaacttcctacgtatgcacctgtgtgccaggatacagcggag
accagtgtgaacttgattttgatgaatgtcactctaatccctgtcgtaatggagccacttgtgttgatggttttaacacattcaggtgcctctgccttcc
aagttatgttggtgcactttgtgagcaagataccgagacatgtgactatggctggcacaaattccaagggcagtgctacaaatactttgcccatc
gacgcacatgggatgcagctgaacgggaatgccgtctgcagggtgcccatctcacaagcatcctgtctcacgaagaacaaatgtttgttaatcg
tgtgggccatgattatcagtggataggcctcaatgacaagatgtttgagcatgacttccgttggactgatggcagcacactgcaatacgagaatt
ggagacccaaccagccagacagcttcttttctgctggagaagactgtgttgtaatcatttggcatgagaatggccagtggaatgatgttccctgc
aattaccatctcacctatacgtgcaagaaaggaacagttgcttgcggccagccccctgttgtagaaaatgccaagacctttggaaagatgaaac
ctcgttatgaaatcaactccctgattagataccactgcaaagatggtttcattcaacgtcaccttccaactatccggtgcttaggaaatggaagatg
ggctatacctaaaattacctgcatgaacccatctgcataccaaaggacttattctatgaaatactttaaaaattcctcatcagcaaaggacaattcaa
taaatacatccaaacatgatcatcgttggagccggaggtggcaggagtcgaggcgctgatccctaaaatggcgaacatgtgttttcatcatttca
gccaaagtcctaacttcctgtgcctttcctatcacctcgagaagtaattatcagttggtttggattttggaccaccgttcagtcattttgggttgccgt
gctcccaaaacattttaaatgaaagtattggcattcaaaaagacagcagacaaaatgaaagaaaatgagagcagaaagtaagcatttccagcct
atctaatttctttagttttctatttgcctccagtgcagtccatttcctaatgtataccagcctactgtactatttaaaatgctcaatttcagcaccgatggc
catgtaaataagatgatttaatgttgattttaatcctgtatataaaataaaaagtcacaatgagtttgggcatatttaatgatgattatggagccttaga
ggtctttaatcattggttcggctgcttttatgtagtttaggctggaaatggtttcacttgctctttgactgtcagcaagactgaagatggcttttcctgg
acagctagaaaacacaaaatcttgtaggtcattgcacctatctcagccataggtgcagtttgcttctacatgatgctaaaggctgcgaatgggatc
ctgatggaactaaggactccaatgtcgaactcttctttgctgcattcctttttcttcacttacaagaaaggcctgaatggaggacttttctgtaaccag
g

| | | |
|---|---|---|
| Defensin, beta 1 | 25 | BC033298, BC047677, NM_005218, X92744 |
| (DEFB1) | | ctccaaaggagccagcgtctccccagttcctgaaatcctgggtgttgcctgccagtc |
| | | gccatgagaacttcctaccttctgctgtttactctctgcttacttttgtctgagatggcct |
| | | caggtggtaactttctcacaggccttggccacagatctgatcattacaattgcgtcag |
| | | cagtggagggcaatgtctctattctgcctgcccgatctttaccaaaattcaaggcacc |
| | | tgttacagagggaaggccaagtgctgcaagtgagctgggagtgaccagaagaaa |
| | | gacgcagaagtgaaatgaactttttataagcattcttttaataaaggaaaattgcttttg |
| | | aagtataaaaaaaaaaaaaaaaaaaaaaaaaaaaaaaaaa |
| Desmoglein 2 | 26 | NM_001943, BC099656, BC099657, BC099655, Z26317 |
| (DSG2) | | BC014581, BC014584, BC017410, BC022413 |
| | | sequence below |

ggcgcggagcggtgcggcggcgggaggcggaggcgagggtgcgatggcgcggagcccgggacgcgcgtacgccctgctgcttctcct
gatctgctttaacgttggaagtggacttcacttacaggtcttaagcacaagaaatgaaaataagctgcttcctaaacatcctcatttagtgcggcaa
aagcgcgcctggatcaccgcccccgtggctcttcgggagggagaggatctgtccaagaagaatccaattgccaagatacattctgatcttgca
gaagaaagaggactcaaaattacttacaaatacactggaaaagggattacagagccaccttttggtatatttgtctttaacaaagatactggagaa
ctgaatgttaccagcattcttgatcgagaagaaacaccattttttctgctaacaggttacgctttggatgcaagaggaaacaatgtagagaaaccc
ttagagctacgcattaaggttcttgatatcaatgacaacgaaccagtgttcacacaggatgtctttgttgggtctgttgaagagttgagtgcagcac
atactcttgtgatgaaaatcaatgcaacagatgcagatgagcccaataccctgaattcgaaaatttcctatagaatcgtatctctggagcctgcttat
cctccagtgttctacctaaataaagatacaggagagatttatacaaccagtgttaccttggacagagaggaacacagcagctacactttgacagt
agaagcaagagatggcaatggagaagttacagacaaacctgtaaaacaagctcaagttcagattcgtattttggatgtcaatgacaatatacctg
tagtagaaaataaagtgcttgaagggatggttgaagaaaatcaagtcaacgtagaagttacgcgcataaaagtgttcgatgcagatgaaatagg
ttctgataattggctggcaaattttacatttgcatcaggaaatgaaggaggttatttccacatagaaacagatgctcaaactaacgaaggaattgtg
acccttattaaggaagtagattatgaagaaatgaagaatcttgacttcagtgttattgtcgctaataaagcagcttttcacaagtcgattaggagtaa
atacaagcctacacccattcccatcaaggtcaaagtgaaaaatgtgaaagaaggcattcattttaaaagcagcgtcatctcaatttatgttagcga
gagcatggatagatcaagcaaaggccaaataattggaaattttcaagcttttgatgaggacactggactaccagcccatgcaagatatgtaaaat
tagaagatagagataattggatctctgtggattctgtcacatctgaaattaaacttgcaaaacttcctgattttgaatctagatatgttcaaaatggca
catacactgtaaagattgtggccatatcagaagattatcctagaaaaaccatcactggcacagtccttatcaatgttgaagacatcaacgacaact
gtcccacactgatagagcctgtgcagacaatctgtcacgatgcagagtatgtgaatgttactgcagaggacctggatggacacccaaacagtg
gccctttcagtttctccgtcattgacaaaccacctggcatggcagaaaaatggaaaatagcacgccaagaaagtaccagtgtgctgctgcaaca
aagtgagaaaaagcttgggagaagtgaaattcagttcctgatttcagacaatcagggttttagttgtcctgaaaagcaggtccttacactcacagt
ttgtgagtgtctgcatggcagcggctgcagggaagcacagcatgactcctatgtgggcctgggacccgcagcaattgcgctcatgattttggc
ctttctgctcctgctattggtaccacttttactgctgatgtgccattgcggaaagggcgccaaaggctttacccccatacctggcaccatagagat
gctgcatccttggaataatgaaggagcaccacctgaagacaaggtggtgccatcatttctgccagtggatcaagggggcagtctagtaggaag
aaatggagtaggaggtatggccaaggaagccacgatgaaaggaagtagctctgcttccattgtcaaagggcaacatgagatgtccgagatgg
atggaaggtgggaagaacacagaagcctgctttctggtagagctacccagtttacaggggccacaggcgctatcatgaccactgaaaccacg
aagaccgcaagggccacaggggcttccagagacatggccggagctcaggcagctgctgttgcactgaacgaagaattcttaagaaattatttc
actgataaagcggcctcttacactgaggaagatgaaaatcacacagccaaagattgccttctggtttattctcaggaagaaactgaatcgctgaa
tgcttctattggttgttgcagttttattgaaggagagctagatgaccgcttcttagatgatttgggacttaaattcaagacactagctgaagtttgcct
gggtcaaaaaatagatataaataaggaaattgagcagagacaaaaacctgccacagaaacaagtatgaacacagcttcacattcactctgtga
gcaaactatggttaattcagagaatacctactcctctggcagtagcttcccagttccaaaatctttgcaagaagccaatgcagagaaagtaactca
ggaaatagtcactgaaagatctgtgtcttctaggcaggcgcaaaaggtagctacacctcttcctgacccaatggcttctagaaatgtgatagcaa
cagaaacttcctatgtcacagggtccactatgccaccaaccactgtgatcctgggtcctagccagccacagagccttattgtgacagagagggt
gtatgctccagcttctaccttggtagatcagccttatgctaatgaaggtacagttgtggtcactgaaagagtaatacagcctcatgggggtggatc
gaatcctctggaaggcactcagcatcttcaagatgtaccttacgtcatggtgagggaaagagagagcttccttgcccccagctcaggtgtgcag
cctactctggccatgcctaatatagcagtaggacagaatgtgacagtgacagaaagagttctagcacctgcttccactctgcaatccagttacca
gattcccactgaaaattctatgacggctaggaacaccacggtgtctggagctggagtccctggccctctgccagattttggtttagaggaatctg
gtcattctaattctaccataaccacatcttccaccagagttaccaagcatagcactgtacagcattcttactcctaaacagcagtcagccacaaact
gacccagagtttaattagcagtgactaatt

| | | |
|---|---|---|
| EGF-like- | 27 | NM_015507, BC038587, AY358333, AF186084, |
| domain, | | DQ031339 |
| multiple 6 | | NM_001408, AF234887, AK124727, D87469 |
| (EGFL6) | | Sequence below |

ccgcagaggagcctcggccaggctagccagggcgcccccagcccctccccaggccgcgagcgcccctgccgcggtgcctggcctcccct
cccagactgcagggacagcacccggtaactgcgagtggagcggaggacccgagcggctgaggagagaggaggcggcggcttagctgct
acggggtccggccggcgccctcccgaggggggctcaggaggaggaaggaggacccgtgcgagaatgcctctgccctggagccttgcgct
cccgctgctgctctcctgggtggcaggtggtttcgggaacgcggccagtgcaaggcatcacgggttgttagcatcggcacgtcagcctgggg
tctgtcactatggaactaaactggcctgctgctacggctggagaagaaacagcaagggagtctgtgaagctacatgcgaacctggatgtaagtt
tggtgagtgcgtgggaccaaacaaatgcagatgctttccaggatacaccgggaaaacctgcagtcaagatgtgaatgagtgtggaatgaaac
cccggccatgccaacacagatgtgtgaatacacacggaagctacaagtgcttttgcctcagtggccacatgctcatgccagatgctacgtgtgt
gaactctaggacatgtgccatgataaactgtcagtacagctgtgaagacacagaagaagggccacagtgcctgtgtccatcctcaggactccg
cctggccccaaatggaagagactgtctagatattgatgaatgtgcctctggtaaagtcatctgtccctacaatcgaagatgtgtgaacacatttgg
aagctactactgcaaatgtcacattggtttcgaactgcaatatatcagtggacgatatgactgtatagatataaatgaatgtactatggatagccata
cgtgcagccaccatgccaattgcttcaatacccaagggtccttcaagtgtaaatgcaagcagggatataaaggcaatggacttcggtgttctgct
atccctgaaaattctgtgaaggaagtcctcagagcacctggtaccatcaaagacagaatcaagaagttgcttgctcacaaaaacagcatgaaaa
agaaggcaaaaattaaaaatgttaccccagaacccaccaggactcctacccctaaggtgaacttgcagcccttcaactatgaagagatagtttc
cagaggcgggaactctcatggaggtaaaaaagggaatgaagagaaaatgaaagaggggcttgaggatgagaaaagagaagagaaagccc
tgaagaatgacatagaggagcgaagcctgcgaggagatgtgtttttccctaaggtgaatgaagcaggtgaattcggcctgattctggtccaaag
gaaagcgctaacttccaaactggaacataaagatttaaatatctcggttgactgcagcttcaatcatgggatctgtgactggaaacaggatagag
aagatgattttgactggaatcctgctgatcgagataatgctattggcttctatatggcagttccggccttggcaggtcacaagaaagacattggcc
gattgaaacttctcctacctgacctgcaaccccaaagcaacttctgtttgctctttgattaccggctggccggagacaaagtcgggaaacttcgag
tgtttgtgaaaaacagtaacaatgccctggcatgggagaagaccacgagtgaggatgaaaagtggaagacaGggaaaattcagttgtatcaa
ggaactgatgctaccaaaagcatcatttttgaagcagaacgtggcaagggcaaaaccggcgaaatcgcagtggatggcgtcttgcttgtttcag
gcttatgtccagatagccttttatctgtggatgactgaatgttactatctttatatttgactttgtagtgcagttccctggtttttttgatattgcatcatag
gacctctggcattttagaattactagctgaaaaattgtaatgtaccaacagaaatattattgtaagatgcctttcttgtataagatatgccaatattgctt
taaatatcatatcactgtatcttctcagtcatttctgaatctttccacattatattataaaatatggaaatgtcagtttatctcccctcctcagtatatctga
tttgtataagtaagttgatgagcttctctctacaacatttctagaaaatagaaaaaaaagcacagagaaatgtttaactgtttgactcttatgatacttct
tggaaactatgacatcaaagatagacttttgcctaagtggcttagctgggtctttcatagccaaacttgtatatttaaattctttgtaataataatatcca
aatcatcaaaaaaaaaaaaaaaaa

| | | |
|---|---|---|
| Eukaryotic | 28 | AK027011, BC078179, AK074361, AL137627, |
| translation | | AL137676, AL157497, BC009350, NM_001013703, |
| initiation factor | | AB037759, AJ243428 |
| 2 alpha kinase 4 | | |
| (EIF2AK4) | | |
| EPB41L3 | 29 | AF515797-Sequence below |
| (Erythrocyte | | AL832598, NM_012307, AB023204, AK090875, |
| membrane | | AK094952 |
| protein band | | |
| 4.1-like 3) | | |

atttacaataaatgaagattaccctcaaatgctagaagctgtctaggtccgtccggtgtgtcagattttcctcagattagatgtgccaataaccaagt
ttattcagtaaacaacttgtacttgtttcatctggttttattactctcacccataaacaggaatgactctttgaccctctggaaatatgtaatgcttccaat
cttgctttgtgtatctcatttaatttgttataaggtagtactgattttagcatattaatgcgatttcttccttgttgtttgctttggtctgtgttcaatccag
agagcttaaattgtcattattttgggaagaaaacctgtatttttgttagtttacaatattatgaaatttcacttcaggagaaactgctgggcttcctgtggct
ttgttttcttagttactttttccgtgccgtgtattttttaattgatttttcttcttttacttgaaaagaaagtgttttattttcaaatctgtccatatttaca
ttctagttcagagccaagccttaaactgtacagaatttccactgtaattaaaactatttagtgttagttataaatagccttcaaaaagagagattctccattc
acgatcacctgcatcacagcccatggtgaatgtatgtttctgcatagcgaaataaaaatggcaaatgcaaaaaaaaaaaaaaaaaaaaaaaaaaa
a

| | | |
|---|---|---|
| Endothelial | 30 | gctgcttcccaccagcaaagaccacgactggagagccgagccggaggcagctg |
| cell-specific | | ggaaacatgaagagcgtcttgctgctgaccacgctcctcgtgcctgcacacctggt |
| molecule 1 | | ggccgcctggagcaataattatgcggtggactgccctcaacactgtgacagcagtg |
| (ESM1; | | agtgcaaaagcagcccgcgctgcgagaggacagtgctcgacgactgtggctgct |
| endocan) | | gccgagtgtgcgctgcagggcggggagaaacttgctaccgcacagtctcaggca |
| BC011989 | | ggatggcatgaagtgtggcccggggctgaggtgtcagccttctaatggggaggat |
| | | ccttttggtgaagagtttggtatctgcaaagactgtccctacggcaccttcgggatgf |
| | | attgcagagagacctgcaactgccagtcaggcatctgtgacagggggacgggaa |
| | | aatgcctgaaattccccttcttccaatattcagtaaccaagtcttccaacagatttgtttc |
| | | tctcacggagcatgacatggcatctggagatggcaatattgtgagagaagaagttg |
| | | gaaagagaatgctgccgggtctcccgtaatgaggaaatggttaaatccacgctgat |
| | | cccggctgtgatttctgagagaaggctctattttcgtgattgttcaacacacagccaa |
| | | cattttaggaactttctagattatagcataaggacatgtaatttttgaagaccaaatgtg |
| | | atgcatggtggatccagaaaacaaaaagtaggatacttacaatccataacatccata |
| | | tgactgaacacttgtatgtgtttgttaaatattcgaatgcatgtagatttgttaaatgtgtg |
| | | tgtatagtaacactgaagaactaaaaatgcaatttaggtaatcttacatggagacagg |
| | | tcaaccaaagagggagctaggcaaagctgaagaccgcagtgagtcaaattagttc |
| | | ttgactttgatgtacattaatgttgggatatggaatgaagacttaagagcaggagaag |
| | | atggggagggggtgggagtgggaaataaaatatttagcccttccttggtaggtagc |
| | | tctctagaatttaattgtgctttttttttttggctttgggaaaagtcaaaataaaacaa |
| | | ccagaaaacccctgaaggaagtaagatgtttgaagcttatggaaatttgagtaacaa |
| | | aca |
| | | gctttgaactgagagcaatttcaaaaggctgctgatgcagttcccgggttacctgtat |
| | | t |
| | | gaaggacggttctggggcataggaaacacatacacttccataaatagctttaacgta |
| | | tgc |
| | | cacctcagagataaatctaagaagtattttacccactggtggtttgtgtgtgtatgaag |
| | | g |
| | | taaatatttatatatttttataaataaatgtgttagtgcaagtcatcttccctacccata |
| | | tttatcatcctcttgaggaaagaaatctagtattatttgttgaaaatggttagaataaaa |
| | | ctatgactctataaggttttcaaacatctgaggcatgataaatttattatccataattat |
| | | agtaataataaccttaataagcataagaaaaacagagtcactctggatttcaaaaatg |
| | | tc |
| | | aaaaaaaaaaaaaa |
| F-box protein | 31 | NM_058229, NM_148177, BC024030, AJ420108, |
| 32 (FBXO32) | | AK056986 |
| FJX1 (Four | 32 | NM_014344, AJ245599, AK026069, BC049171, |
| jointed box 1) | | BC071898 |
| FOLH1 (Folate | 33 | BC025672 |
| hydrolase | | NM_004476 |
| (prostate- | | AF176574 |
| specific | | M99487 |
| membrane | | NM_001014986 |
| antigen) 1 | | |
| Family with | 34 | BC008865 |
| sequence | | NM_032231 |
| similarity 96, | | NM_001014812 |
| member A | | |
| (FLJ22875) | | |
| FLJ46072 | 35 | BC033256, NM_198488, AK127960 |
| Coagulation | 36 | BC012453 |
| factor II | | BC018130 |
| (thrombin) | | NM_005242 |
| receptor-like 1 | | |
| (F2RL1; | | |
| GPR11) | | |
| Frizzled 10 | 37 | AB027464, BC070037, NM_007197 |
| (FZD10) | | Sequence below |

acacgtccaacgccagcatgcagcgcccgggcccccgcctgtggctggtcctgcaggtgatgggctcgtgcgccgccatcagctccatgga
catggagcgcccgggcgacggcaaatgccagcccatcgagatcccgatgtgcaaggacatcggctacaacatgactcgtatgcccaacctg
atgggccacgagaaccagcgcgaggcagccatccagttgcacgagttcgcgccgctggtggagtacggctgccacggccacctccgcttct
tcctgtgctcgctgtacgcgccgatgtgcaccgagcaggtctctacccccatccccgcctgccgggtcatgtgcgagcaggcccggctcaagt
gctccccgattatggagcagttcaacttcaagtggcccgactccctggactgccggaaactccccaacaagaacgaccccaactacctgtgca
tggaggcgcccaacaacggctcggacgagcccacccggggctcgggcctgttcccgccgctgttccggccgcagcggccccacagcgcg
caggagcacccgctgaaggacgggggccccgggcgcggcggctgcgacaacccgggcaagttccaccacgtggagaagagcgcgtcg
tgcgcgccgctctgcacgcccggcgtggacgtgtactggagccgcgaggacaagcgcttcgcagtggtctggctggccatctgggcggtgc
tgtgcttcttctccagcgccttcaccgtgctcaccttcctcatcgacccggcccgcttccgctaccccgagcgccccatcatcttcctctccatgtg
ctactgcgtctactccgtgggctacctcatccgcctcttcgccggcgccgagagcatcgcctgcgaccgggacagcggccagctctatgtcat
ccaggagggactggagagcaccggctgcacgctggtcttcctggtcctctactacttcggcatggccagctcgctgtggtgggtggtcctcac
gctcacctggttcctggccgccggcaagaagtggggccacgaggccatcgaagccaacagcagctacttccacctggcagcctgggccatc
ccggcggtgaagaccatcctgatcctggtcatgcgcagggtggcgggggacgagctcaccggggtctgctacgtgggcagcatggacgtc
aacgcgctcaccggcttcgtgctcattcccctggcctgctacctggtcatcggcacgtccttcatcctctcgggcttcgtggccctgttccacatc
cggagggtgatgaagacgggcggcgagaacacggacaagctggagaagctcatggtgcgtatcgggctcttctctgtgctgtacaccgtgc
cggccacctgtgtgatcgcctgctacttttacgaacgcctcaacatggattactggaagatcctggcggcgcagcacaagtgcaaaatgaaca
accagactaaaacgctggactgcctgatggccgcctccatccccgccgtggagatcttcatggtgaagatctttatgctgctggtggtggggat
caccagcgggatgtggatttggacctccaagactctgcagtcctggcagcaggtgtgcagccgtaggttaaagaagaagagccggagaaaa
ccggccagcgtgatcaccagcggtgggatttacaaaaaagcccagcatccccagaaaactcaccacgggaaatatgagatccctgcccagt
cgcccacctgcgtgtgaacagggctggagggaagggcacaggggcgcccggagctaagatgtggtgcttttcttggttgtgtttttctttcttctt
cttcttttttttttttttataaaagcaaaagagaaatacataaaaaagtgtttaccctgaaattcaggatgctgtgatacactgaaaggaaaaatgtct
taaagggttttgttttgttttggttttccagcgaagggaagctcctccagtgaagtagcctcttgtgtgaactaatttgtggtaaagtagttgattcagcc
ctcagaagaaaacttttgtttagagccctccgtaaatatacatctgtgtatttgagttggctttgctacccatttacaaataagaggacagataactg
ctttgcaaattcaagagcctcccctgggttaacaaatgagccatccccagggcccacccccaggaaggccacagtgctgggcggcatccctg
cagaggaaagacaggacccggggcccgcctcacaccccagtggatttggagttgcttaaaatagactctggccttcaccaatagtctctctgc
aagacagaaacctccatcaaacctcacatttgtgaactcaaacgatgtgcaatacatttttttctctttccttgaaaataaaaagagaaacaagtattt
tgctatatataaagacaacaaaagaaatctcctaacaaaagaactaagaggcccagccctcagaaacccttcagtgctacattttgtggcttttta
atggaaaccaagccaatgttatagacgtttggactgatttgtggaaaggaggggggaagagggagaaggatcattcaaaagttacccaaagg
gcttattgactctttctattgttaaacaaatgatttccacaaacagatcaggaagcactaggttggcagagacactttgtctagtgtattctcttcaca
gtgccaggaaagagtggtttctgcgtgtgtatatttgtaatatatgatatttttcatgctccactattttattaaaaataaaatatgttctttaaaaaaa

| | | |
|---|---|---|
| Glycoprotein | 38 | BC008151, BC047295, NM_005278, NM_001001994, |
| M6B (GPM6B) | | NM_001001996, U45955 |
| P2RY14 | 39 | BC034989 |
| (Purinergic | | NM_014879 |
| receptor P2Y, | | D13626 |
| G-protein | | |
| coupled, 14 | | |
| (GPR105) | | |
| Homeo box B7 | 40 | cgtaaaaccgacactaaaacgtccctgcctacaaatcatccggccaaattatga |
| (HOXB7) | | gttcattgtattatgcgaatgctttattttctaaatatccagcctcaagttcggttttcg |
| BC015345 | | ctaccg |
| | | gagccttcccagaacaaacttcttgtgcgtttgcttccaacccccagcgcccggg |
| | | ctatggagcgggttcgggcgcttccttcgccgcctcgatgcagggcttgtaccc |
| | | cggcggggggggcatggcgggccagagcgcggccggcgtctacgcggcc |
| | | ggctatgggctcgagccgagttccttcaacatgcactgcgcgccctttgagcag |
| | | aacctctccggggtgtgtcccggcgactccgccaaggcggcgggcgccaag |
| | | gagcagagggactcggacttggcggccgagagtaacttccggatctacccctg |
| | | gatgcgaagctcaggaactgaccgcaaacgaggccgccagacctacacccg |
| | | ctaccagaccctggagctggagaaagaatttcactacaatcgctacctgacgcg |
| | | gcggcggcgcatcgagatcgcgcacacgctctgcctcacggaaagacagatc |
| | | aagatttggtttcagaaccggcgcatgaagtggaaaaaggagaacaagaccgc |
| | | gggcccggggaccaccggccaagacagggctgaagcagaggaggaagag |
| | | gaagagtgagggatggagaaagggcagaggaagagacatgagaaagggag |
| | | aggaagagaagcccagctctgggaactgaatcaggaaactcaaatcgaatag |
| | | ggaagtaaaaaaacaaaacaaaaaacaaaaaaaaaaaaaa |
| Immunoglobulin | 41 | NM_014333, BC047021, NM_145296, NM_021189, |
| superfamily, | | BC125103, AB017563, AK172730 AL080181 |
| member 4 | | |
| (IGSF4) | | |
| FLJ35593 fis | 42 | NM_006469, NM_016389, DQ050632, AK001273, |
| (IVNS1ABP) | | AK023020, AK092912, AK093912, AJ012449 |
| Potassium | 43 | BC060793 |
| channel, | | NM_003740 |
| subfamily K, | | AF084830 |
| member 5 | | AK001897 |
| (KCNK5) | | |
| Leucine zipper, | 44 | NM_021020 |
| putative tumor | | AF123659 |
| suppressor 1 | | |
| (LZTS1) | | |
| clone | 45 | BC038772 |
| IMAGE: 527072 | | Sequence below. |
| 7 (MCM4) | | |

gctccgagtggcggttgtttcaagatggcggacgtggcgggcccctcccgccccagtgccgcggcgttctggagccgggacttttctgatga
agaacaatcagtagtatacgttccaggaatttctgctgaaggaaatgtcagatcaagacacaagctgatgagtccaaaagctgatgttaaactta
agacttccagggtgactgatgcttcaatctccatggagtccttaaaaggcacaggagattcagtagatgaacagaattcctgcaggggagaaat
aaagagtgcatcattgaaggatttatgtcttgaagacaaaagacgcattgcaaacttaattaaagaactggccagagtaagtgaggaaaaggaa
gtgacagaggaaagactgaaagctgagcaggagtcatttgagaagaagatcaggcagttggaagaacagaatgaactgatcatcaaagaaa
gggaagatatccttttgaaagttctcttttttaacgttcaagaagtttgactatttctttttttttttgagacgaaatctcgctcttgtcgcctaggctgcag
tgcaatggtgcgatttcagttcaccgcaacctccacctcccggttcaagcgattctcctaccccagctactcgggaggttgaggcaggagaatc
gcttaaacccaggcggcagaggttgcagtgagccaagatcgcgccactgcactccagcctcagcaatagagtgagactgtctcaaaaaaaaa
aaaaaaaaaaacctgccaattttcaaacataccgtagagattattttcaggtgccattttatagtatagcagcagggcttttactctgtgtatgcaca
gatgcagtctggggcatggtttgtgtgctggactttctcatggccatcatcagtatgcttatggatttgatgacaggcatagcctgggcatatcacc
tcattggtaaagggctagagcctttcttttttatggcacttctttttttgagatagggtcttactctgtcaccctggctagagtacactggtacaatcac
ggctcaatgtaggcttaacctcctgggctcaggtgtatgtcactatgcccggctactttttgtattttttggtagagacggcttcgccacgttgccca
ggctgcaagcgatatgcctaggctcaagcgatctgcccacctcaacttccggaagtgctgagattacaggtgtgagccactgcacccagccttt
gttttattttttattttttgagaggtatgattctttctagagattttttctcatggctactattagatcaggaatgggtgattggagattattagattctagg
ttaacttctaccactttaccctaatacataaaactttttcctaaataaatgatggaaggaataatacttggttacctggcattatttttcataagaaaaaa
gctttactaaccactacatttatggaaatttgtaggggtaagtattttataggtcataaaaaacaccataatataacgaatctcattttctttaaatgtga
attaaatcctaacagtcatctttataaaatgaccataggctaaaatcttacgtgtaagtactactacaataaataatttctgaaacctttaaaaaaaaa
aaaaaaaaaaaaagaaaaaaaaaaaaaaaaa

| | | |
|---|---|---|
| Nidogen 2 | 46 | BC035608 NM_007361, AJ223500, D86425 |
| (osteonidogen) | | |
| (NID2) | | |
| Olfactomedin- | 47 | BC067274 |
| like 2B | | NM_015441 |
| (OlfMl2B) | | BC047472 |
| Oxysterol | 48 | BC017731 |
| binding protein- | | AL832293 |
| like 3 | | |
| (OSBPL3) | | |
| Protocadherin | 49 | AL137505 |
| 17 (PCDH17) | | Sequence below. |

cggacgcgtgggcatgtatgtaccagcagtggttacttgcattgtgtagtgtttttcaagaggtctgggtcttaacaaaatgttttcctttatctcagt
gctcttctgcctctttttgttggtgtcctttgagaacaatacaccttctattccttcatttggttacacctttccttgtgacatttagcgagtttcaaactta
cttccatatgaggctaagaaacctcaaatttcaggaattgggaaaaataaaattagcacttgcagaagtagcagcagatggGaaaatgccttgatt
gacattttctttcagcatttaaaatttttggcattttacagcttcatgacaaacagttttgtgcccataccttagaaaatgtggtgctgagttaaataaag
gctgtttgagcactggagcagaaaaatgcattatttgcaaactggtggataattttgtgccttctcttctggccaccaagccagtgtagaaacagc
aaaaatgtcataaaaattcttatatttaaaacaaaaacaaaagcaaaaacaaacattgaattaaattaagttttgtaattttaaactttaaaaacttctac
tgaaaatatttccgccaaatgccatcaatattttagactgtacctcgtttgcaaaactgctttgagagggaagagtggacaactcccatcagcctta
ttctcttgagaactatattttggttcctagtaacagcctttccaaagctctactcttggtttttattactcataaatgtttaaattagaaaagaagggacct
tgtacatgtgaaacctaattgactctctatattttggacaatttatgtatctgaaatgtgttgtctctgttatatgatgttatttttgccaggagactacag
gttgatttagcttgatagctgaaatttgatggaaaactgatttccatttagtcttaccaagtgttgcttctctcttactagacagatatccacttagtaaa
atctaaagcagtatgtaaatgaaaccagcaaagagagtagggtttattttataaacattcttaatgctaagtaaccagttgttcaatttattatatgtgt
ctgaggacattaaaacaccataagattgtaataattggttgtgccaatgtgtgagggatttacctttaggctctctgtcaccagtgatttactagtgtt
agctgtttaacacattatctgtatttagtagtgattatttatttacaagttggtggtaattcagcagtcaggactctaagcttttatagttgaattgagga
aatctcgcttttattcatttagctggcaactgcctttattgcagacctctggtgcttggctttcaaggaagcctatgagatgccaaaatcacaccttta
gagagcaccttgctctaataggtgatgcatgagcaaacagtgagatttgaaggggttttaacataatttagaatgtgaaaaaaatatcaattcatat
ctttcaagtactaacccctcaaaaaagcccacacatacaaaatatgtgatgtgataccactttgtcttttaggtctttaagtaactgaagttaagcac
agaaaaaaaaatcacttcatggaaatttcagtaagaaacccaaacttctaaaaattgcttgcagatgagctagaaaaaaaaaaaaaaaaaaa

| | | |
|---|---|---|
| Phospholipase | 50 | NM_016341, AF117948, AF190642, AL050031, |
| C, epsilon 1 | | AB040949, AK022543 |
| (PLCE1) | | |
| Plexin domain | 51 | BC036059, AF279144, AY704670, AY704671, |
| containing 1 | | AY704672, AK093589, AK127539 |
| (PLXDC1) | | |
| PR domain | 52 | NM_001198 |
| containing 1, | | NM_182907 |
| with ZNF | | AY198414 |
| domain | | AY198415 |
| (PRDM1) | | |
| Response gene | 53 | BC066334, NM_014059, AF036549, AK091099, |
| to complement | | AK095079 |
| 32 (RGC32) | | |
| Regulator of G- | 54 | BC015510 |
| protein | | NM_002922 |
| signalling 1 | | |
| (RGS1) | | |
| Ribonucleotide | 55 | NM_001034 |
| reductase M2 | | X59618 |
| polypeptide | | |
| (RRM2) | | |
| Sodium | 56 | BC006526 |
| channel, | | Sequence below. |
| nonvoltage- | | |
| gated 1 alpha | | |
| (SCNN1A) | | |

gggcactcagggcccagagctcagccttgaccctgacccttgctctccccaatccactccggggctcatgaaggggaacaagctggaggag
caggaccctagacctctgcagcccataccaggtctcatggaggggaacaagctggaggagcaggactctagccctccacagtccactccag
ggctcatgaaggggaacaagcgtgaggagcaggggctgggccccgaacctgcggcgccccagcagcccacggcggaggaggaggcc
ctgatcgagttccaccgctcctaccgagagctcttcgagttcttctgcaacaacaccaccatccacggcgccatccgcctggtgtgctcccagc
acaaccgcatgaagacggccttctgggcagtgctgtggctctgcacctttggcatgatgtactggcaattcggcctgcttttcggagagtacttc
agctaccccgtcagcctcaacatcaacctcaactcggacaagctcgtcttccccgcagtgaccatctgcaccctcaatccctacaggtacccgg
aaattaaagaggagctggaggagctggaccgcatcacagagcagacgctctttgacctgtacaaatacagctccttcaccactctcgtggccg
gctcccgcagccgtcgcgacctgcgggggactctgccgcaccccttgcagcgcctgagggtcccgcccccgcctcacggggcccgtcgag
cccgtagcgtggcctccagcttgcgggacaacaacccccaggtggactggaaggactggaagatcggcttccagctgtgcaaccagaacaa
atcggactgcttctaccagacatactcatcaggggtggatgcggtgagggagtggtaccgcttccactacatcaacatcctgtcgaggctgcca
gagactctgccatccctggaggaggacacgctgggcaacttcatcttcgcctgccgcttcaaccaggtctcctgcaaccaggcgaattactctc
acttccaccacccgatgtatggaaactgctatactttcaatgacaagaacaactccaacctctggatgtcttccatgcctggaatcaacaacggtc
tgtccctgatgctgcgcgcagagcagaatgacttcattcccctgctgtccacagtgactggggcccgggtaatggtgcacgggcaggatgaa
cctgcctttatggatgatggtggctttaacttgcggcctggcgtggagacctccatcagcatgaggaaggaaaccctggacagacttgggggc
gattatggcgactgcaccaagaatggcagtgatgttcctgttgagaacctttacccttcaaagtacacacagcaggtgtgtattcactcctgcttcc
aggagagcatgatcaaggagtgtggctgtgcctacatcttctatccgcggccccagaacgtggagtactgtgactacagaaagcacagttcct
gggggtactgctactataagctccaggttgacttctcctcagaccacctgggctgtttcaccaagtgccggaagccatgcagcgtgaccagcta
ccagctctctgctggttactcacgatggccctcggtgacatcccaggaatgggtcttccagatgctatcgcgacagaacaattacaccgtcaac
aacaagagaaatggagtggccaaagtcaacatcttcttcaaggagctgaactacaaaaccaattctgagtctccctctgtcacgatggtcaccct
cctgtccaacctgggcagccagtggagcctgtggttcggctcctcggtgttgtctgtggtggagatggctgagctcgtctttgacctgctggtca
tcatgttcctcatgctgctccgaaggttccgaagccgatactggtctccaggccgagggggcaggggtgctcaggaggtagcctccaccctg
gcatcctcccctccttcccacttctgcccccaccccatgtctctgtccttgtcccagccaggccctgctccctctccagccttgacagcccctccc
cctgcctatgccaccctgggcccccgcccatctccagggggctctgcaggggccagttcctccacctgtcctctgggggggccctgagagg
gaaggagaggtttctcacacaaggcagatgctcctctggtgggagggtgctggccctggcaagattgaaggatgtgcagggcttcctctca
gagccgcccaaactgccgttgatgtgtggaggggaagcaagatgggtaagggctcaggaagttgctccaagaacagtagctgatgaagctg
cccagaagtgccttggctccagccctgtaccccttggtactgcctctgaacactctggtttccccacccaactgcggctaagtctctttttcccttg
gatcagccaagcgaaacttggagctttgacaaggaactttcctaagaaaccgctgataaccaggacaaaacacaaccaagggtacacgcag
gcatgcacgggtttcctgcccagcgacggcttaagccagcccccgactggcctggccacactgctctccagtagcacagatgtctgctcctcc
tcttgaacttgggtgggaaaccccacccaaaagccccctttgttacttaggcaattccccttccctgactcccgagggctagggctagagcaga
cccgggtaagtaaaggcagacccagggctcctctagcctcatacccgtgccctcacagagccatgccccggcacctctgccctgtgtctttcat
acctctacatgtctgcttgagatatttcctcagcctgaaagtttccccaaccatctgccagagaactcctatgcatcccttagaaccctgctcagac
accattacttttgtgaacgcttctgccacatcttgtcttccccaaaattgatcactccgccttctcctgggctcccgtagcacactataacatctgctg
gagtgttgctgttgcaccatactttcttgtacatttgtgtctcccttcccaactagactgtaagtgccttgcggtcagggactgaatcttgcccgtttat
gtatgctccatgtctagcccatcatcctgcttggagcaagtaggcaggagctcaataaatgtttgttgcatgaagaaaaaaaaaaaaaaaaaaaa
aaaaaaaaaaaaaaaaaaaaaaaaa

| | | |
|---|---|---|
| cytochrome | 57 | AL021683 |
| oxidase | | NM_005138 |
| deficient | | |
| homolog 2 | | |
| (SCO2) | | |
| SlamF8 | 58 | AK074669 |
| (BLAME) | | Sequence below. |

acttttgggacatcctgttctgagtcaagattcctccttctgaacatgggactttccagaaggaccacagctcctcccgtgcatccactcggcctg
ggaggttctggattttggctgtcgagggagtttgcctgcctctccagagaaagatggtcatgaggcccctgtggagtctgcttctctgggaagcc
ctacttcccattacagttactggtgcccaagtgctgagcaaagtcgggggctcggtgctgctggtggcagcgcgtccccctggcttccaagtcc
gtgaggctatctggcgatctctctggccttcagaagagctcctggccacgtttttccgaggctccctagagactctgtaccattcccgcttcctgg
gccgagcccagctacacagcaacctcagcctggagctcgggccgctggagtctggagacagcggcaacttctccgtgttgatggtggacac
aaggggccagccctggacccagaccctccagctcaaggtgtacgatgcagtgcccaggcccgtggtacaagtgttcattgctgtagaaaggg
atgctcagccctccaagacctgccaggttttcttgtcctgttgggcccccaacatcagcgaaataacctatagctggcgacgggagacaaccat
ggactttggtatggaaccacacagcctcttcacagacggacaggtgctgagcatttccctgggaccaggagacagagatgtggcctattcctg
cattgtctccaaccctgtcagctgggacttggccacagtcacgccctgggatagctgtcatcatgaggcagcaccagggaaggcctcctacaa
agatgtgctgctggtggtggtgcctgtctcgctgctcctgatgctggttactctcttctctgcctggcactggtgcccctgctcagggaaaaagaa
aaaggatgtccatgctgacagagtgggtccagagacagagaacccccttgtgcaggatctgccataaaggacaatatgaactgatgcctgga
ctatcagtaaccccactgcacaggcacacgatgctctgggacataactggtgcctggaaatcaccatggtcctcatatctcccatgggaatcctg
tcctgcctcgaaggagcagcctgggcagccatcacaccacgaggacaggaagcaccagcacgtttcacacctcccccttccctctcccatctt
ctcatatcctggctcttctctgggcaagatgagccaagcagaacattccatccaggacactggaagttctccaggatccagatccatggggaca
ttaatagtccaaggcattccctcccccaccactattcataaagtattaaccaactggcaccaaggaattgcctccagcctgagtcctaggctctaa
aagatattacatatttgaactaatagaggaactctgagtcacccatgccagcatcagcttcagccccagaccctgcagtttgagatctgatgcttc
ctgagggccaaggcattgctgtaagaaaaggtctagaaataggtgaaagtgagaggtgggggacaggggtttctctttctggcctaaggacttt
caggtaatcagagttcatgggccctcaaaggtagattgcagttgtagacaccgaggatggttgacaacccatggttgagatgggcaccgttttg
caggaaacaccatattaatagacatcctcaccatctccatccgctctcacgcctcctgcaggatctgggagtgagggtggagagtctttcctcac
gctccagcacagtggccaggaaaagaaatactgaatttgccccagccaacaggacgttcttgcacaacttcaagaaaagcagctcagctcag
gatgagtcttcctgcctgaaactgagagagtgaagaaccataaaacgctatgcagaaggaacattatggagagaaagggtactgaggcactct
agaatctgccacattcattttcaaatgcaaatgcagaagacttaccttagttcaaggggaggggacaaagaccccacagcccaacagcaggac
tgtagaggtcactctgactccatcaaactttttattgtggccatcttaggaaaatacattctgcccctgaatgattctgtctagaaaagctctggagta
ttgatcactactggaaaaacacttaaggagctaaacttaccttcggggattattagctgataaggttcacagtttctctcacccaggtgtaactgga
ttttttctggggcctcaatccagtcttgataacagcgaggaaagaggtattgaagaaacaggggtgggtttgaagtactattttcccagggtggct
tcaatctccccacctaggatgtcagccctgtccaaggaccttccctcttctccccagttcctgggcaatcacttcaccttggacaaaggatcagca
cagctggcctccagatccacatcaccactcttccactcgattgttcccagatcctccctgcctggcctgctcagaggttccctgttggtaacctgg
ctttatcaaattctcatccctttcccacacccacttctctcctatcaccttcccccaagattacctgaacagggtccatggccactcaacctgtcagct
tgcaccatccccacctgccacctacagtcaggccacatgcctggtcactgaatcatgcaaaactggcctcagtccctaaaaatgatgtggaaag
gaaagcccaggatctgacaatgagccctggtggatttgtggggaaaaaatacacagcactccccacctttctttcgttcatctccagggcccca
cctcagatcaaagcagctctggatgagatgggacctgcagctctccctccacaaggtgactcttagcaacctcatttcgacagtggtttgtagcg
tggtgcaccagggccttgttgaacagatccacactgctctaataaagttcccatccttaatgaag

| | | |
|---|---|---|
| SLIT2 | 59 | NM_004787, AB017168, AK027326 |
| Spondin 1, | 60 | NM_006108 |
| extracellular | | AB018305 |
| matrix protein | | AK074803 |
| (SPON1) | | BC041974 |
| sprouty | 61 | Sequence below. |
| homolog 4 | | |
| (SPRY4) | | |

gcgagctgagctgacagcgcggagctggcgctgtggagcgcagggagccttgccggttcctccgaccggcgtctgcgagtacagcggcg
gctaacctgccccggcttcaggatttacacagacgtggggcgatgcttgtgaccctgcagctcctcaaaccagcctgtattgagcggtttgcag
cctgatgctcagccccctccccacagggcccctagaagcctgtttctccgtacagtccaggacctccagccccatggagcccccgatcccaca
gagcgcccccttgactcccaactcagtcatggtccagccccttcttgacagccggatgtcccacagccggctccagcacccactcaccatcct
acccattgaccaggtgaagaccagccatgtggagaatgactacatagacaaccctagcctggccctgaccaccggcccaaagcggacccg
gggcggggccccagagctggccccgacgcccgcccgctgtgaccaggatgtcacccaccattggatctccttcagcgggcgccccagctct
gtgagcagcagcagcagcacatcctctgaccaacggctcttagaccacatggcaccaccacccgtggctgaccaggcctcaccaagggctg
tgcgcatccagcccaaggtggtccactgccagccgctggacctcaagggcccggcggtcccacccgagctggacaagcacttcttgctgtg
cgaggcctgtgggaagtgtaaatgcaaggagtgtgcatccccccggacgttgccttcctgctgggtctgcaaccaggagtgcctgtgctcagc
ccagactctggtcaactatggcacgtgcatgtgtttggtgcagggcatcttctaccactgcacgaatgaggacgatgagggctcctgcgctgac
cacccctgctcctgctcccgctccaactgctgcgcccgctggtccttcatgggtgctctctccgtggtgctgccctgcctgctctgctacctgcct
gccaccggctgcgtgaagctggcccagcgtggctacgaccgtctgcgccgccctggttgccgctgcaagcacacgaacagcgtcatctgca
aagcagccagcggggatgccaagaccagcaggcccgacaagcctttctgacagtttgtgtcgaagccccagtgctctgcctggaaacctggt
tctcttctgacatctaagaagactgcagcaaggtcagaggttttagcctcctgaggctgaccttgctagtctgcccactccctacccccagcttcg
gaaaatacagagaccaccaccacgtaccctgtattccccaaggtgatgaagaagcactttggggctttttttcagggtcctgaaactttgtgtcaa
acagacaatgcaggggcagggtgtggtttggggggaaatttttctttttcagaagacagaacacagatgtggacacatatccggaaactgcag
ctgcttgaatgccttcccagcccctccttctccctccctccctccgccccccccttcctcttttccattgtctttggctctcacaggagctagctgcct
gggaggaattgttaactgagtaccagggtacctttaaagaagacccttggagtcttctataccttcttctccttccccatctcactccaccccacttt
gtccctgatgtcttggggaaggtgtagaacaccctagcagttcctattgtatatacttgggagccactgagaacagaggacggccagtgagtcc
aagcctcgttcctccttctgcctccccggagccacaggatggatttaggagccactgctcagtgcacttctcccttccaactgcatcaactaactc
tcgggggtgttctgctcaccacaccgtccttcggttcttactgagtcacagactcgcctgcccactacgtgtcctgggttctctactcagatccctt
ccagaaactttatatgggtagaggaagccagggcggcaaatgcgagaccaaatatcattttgccaatgagtctgaggctgtggtctctggatcc
agtcattatgtttttatagaataattaaaccggatgctaacggtgttttaaaaaataataataaaacaacttgtttccttttggccacccccaggaagg
gctgatttcaaaatctgggggcgagcaacctcaaggaacacaatttccctccctatcaacaagaggattttaacagcaaagaagagaggcagc
acctcccattggcagaatgaccgctgagccaggctgggtttgggtttcttctcttctgattctgctgctcactgtcatagccttttgtgtatagtgatg
tgtctgtatctttaatgtaaatagagagatgatgaaaaaagagtctattttagtgttaggaagccccagcaggggagtcggaagagcttggaaga
gctggggagagggtaggggaaaggtttttccaggggccactgggtttgagccctgcttctgtgcacagccacaccaccctctcccgacagcc
ctcaaagacgtagcaactctttctctcaaggtgctaaaggactcagaaggtgcagcacgtccagtgggtaggtacttgttgcatgcaaaagctgt
agtgtatctggtccttcctccccagcttttgtgtggggttcttgctttgtgtggtattttgttttcccctctaatgagagggcatggcctgagcagaag
agctaccccaggtgaaactggaagtgcatgaggcagagcgtccgtagcatttccagtttgttctgtataggacagaggtgcctccgggaagga
ggcagcgaggtaggtagctatgataggcacctaatgcttctcaaggacttattttttccttcttgaagactagtagtaacatcttatgatttagagtaa
gttgattgtaaccataggtatttattgattggaggaagggagggtcatattattttcggctttatttatgtaacatttgctagcttataaaaggcgaatgt
gaaatattgcatctgcattttccaaggctgattcgtgtagctacccttgccacagttgtgacggatgtatggatgttcttgaacatttcagaaggagt
ggtagaaaaaaacacacattcagccaaccacttatatgaattgaatgtatcagaagtgtactgaagggactggagatggttttcctcagatgagg
gggccccaaaattgatagtgcacatctgcacgctttctgcgaggcctcagaacttttcccagggcccctccctcaaattgtctccatgggaaactt
gacccagtggcaagttgcactttggtgatcttggtggtctacacacccgttctgtggagagtcgatttacataagctgtgtatacacacacacaca
cacacacacacacacacacacacacacccctaccccacactgactgtctaccgacagagaccctatttcctggcaaacggcctcctgaaccct
gactttttgtgtacatacttgtaaacacggatttttctgggttttggtttgctttttccttttttccccctgcccctgttctagcttgttcttcttggtttgc
tttcaacctgcttgatggatgtctgcagagtgctctctaagagtccacctcagtgcctcgtgtgctcagtggtcatgggaaggagcgaaggaaccatc
cttggttctcccagcttggttgtgtagcaatccctcagcattgtttttctcagcttcttggcaaaaattaaaacaacaacaacaacaacaacaacaac
aacaaacagaaggataaactggcttgcctgtggaccctccccggctctggggccagtcgagagccactgagggacccagcactcagagac
acaacacacatgtgtagctgcttctggctgagtgtgtttcctgtcaccaatggcctgtttggctggacgatgcctcggcttgaccttttttgaaaagt
gctggttagttcccgccccctggtaaacctggggtaggtgggggttctgtcttaactcgaggggcacctgggatccaggacgcttctaggggg
ctctggctgcccgtgttaatgaaggacagcgcttccgcgagcaccctgggaactgggtcttgggtagcaaagccctcccagagaaaagatgg
gcacaactaaggctttcctgagcaggaagggggtgaagaccaatcccttcctttggtcctttggtacgcaccccctcagagctgagatggaag
acatggctagttcttttcagccttgtggagcctgtcagtcgccatcatacctcgagtgaggcccagctagataatgacttgtccaagatggcacac
gtggaaagttgatctgcaccagaacccggatgactgtcaccttgaagcgtcctgttctccttctgtgctgtcccaggaagtgtctggcgggcgtg
ggcagcacagctctacactgtacgattcactagggcatcctgcgagcctcactagccttctggttcatgcctttgacaagcatttttgtgccccctc
tgcttactgtgacagtcgatgatgaatcttgcgttgccattttctgctgtgggtaactgcgtgcagtgtcttgccttgctttctcttcttactgtcccaca
gcttggtttcatgttacaaacagaaaagctcgaggctcccaccccgccacatcccaacttcatttccccctcactgtagcccatttccaccccacc
acaaagttgccacaggttttctttgtatagaatatttattttgaagctctattttaatagtatttattttagaaagtctactattgtaagagttcttctgttt
gtgaagaaaaaaacaagttaaaaactgaatgtactgatttagaaaatatatataaatatatattgttaaatataaa

| | | |
|---|---|---|
| Stanniocalcin 2 | 62 | BC000658, BC006352, BC013958, AF055460, AB012664, |
| (STC2) | | AK027390, AK075406, AK095891 |
| Stress 70 | 63 | BC036370 |
| protein | | NM_006948 |
| chaperone, | | BC017580 |
| microsome- | | AK128540 |
| associated, | | |
| 60 kDa (STCH) | | |
| Tumor- | 64 | BC014785, AK026585, NM_002354, M26481, M32306, |
| associated | | M32325, M33011, X14758 |
| calcium signal | | |
| transducer 1 | | |
| (TACSTD1) | | |
| Threonyl-tRNA | 65 | BC088355 |
| synthetase | | Sequence below. |
| (TARS) | | |

cccacgcgtccgccacctcccacccgcctcttggctcctctcctctaggccgtcgctttcgggttctctcatcgcttcgtcgttcgccaatgtttga
ggagaaggccagcagtccttcagggaagatgggaggcgaggagaagccgattggtgctggtgaagagaagcaaaaggaaggaggcaaa
aagaagaacaaagaaggatctggagatggaggtcgagctgagttgaatccttggcctgaatatatttacacacgtcttgagatgtataatatact
aaaagcagaacatgattccattctggcagaaaaggcagaaaaagatagcaagccaattaaagtcactttgcctgatggtaaacaggttgatgcg
gaatcttggaaaactacaccatatcaaattgcctgtggaattagtcaaggcctggccgacaacaccgttattgctaaagtaaataatgttgtgtgg
gacctggaccgccctctggaagaagattgtaccttggagcttctcaagtttgaggatgaggaagctcaggcagtgtattggcactctagtgctca
cataatgggtgaagccatggaaagagtctatggtggatgtttatgctacggtccgccaatagaaaatggattctattatgacatgtacctcgaaga
agggggtgtgtctagcaatgatttctcttctctggaggctttgtgtaagaaaatcattaaagaaaaacaagcttttgaaagactggaagttaagaaa
gaaactttactggcaatgtttaagtacaacaagttcaaatgccggatattgaatgaaaaggtgaatactccaactaccacagtctatagatgtggc
cctttgatagatctctgccggggtcctcatgttagacacacgggcaaaattaaggctttaaaaatacacaaaaattcctccacgtactgggaagg
caaagcagatatggagactctccagagaatttatggcatttcattcccagatcctaaaatgttgaaagagtgggagaagttccaagaggaagcta
aaaaccgagatcataggaaaattggcagggaccaagaactatatttctttcatgaactcagccctggaagttgcttttttctgccaaaaggagcct
acatttataatgcacttattgaattcattaggagcgaatataggaaaagaggattccaggaggtagtcaccccaaacatcttcaacagccgactct
ggatgacctcgggccactggcagcactacagcgagaacatgttctcctttgaggtggagaaggagctgtttgccctgaaacccatgaactgcc
caggacactgccttatgtttgatcatcggccaaggtcctggcgagaactgcctctgcggctagctgattttggggtacttcataggaacgagctg
tctggagcactcacaggactcacccgggtacgaagattccaacaggatgatgctcacatattctgtgccatggagcagattgaagatgaaataa
aaggttgtttggattttctacgtacggtatatagcgtatttggattttcttttaaactaaacctttctactcgcccagaaaaattccttggagatatcgaa
gtatgggatcaagctgagaaacaacttgaaaacagtctgaatgaatttggtgaaaagtgggagttaaactctggagatggagctttctatggccc
aaagattgacatacagattaaagatgcgattgggcggtaccaccagtgtgcaaccatccagctggatttccagttgcccatcagatttaatcttac
ttatgtaagccatgatggtgatgataagaaaaggccagtgattgttcatcgagccatcttgggatcagtggaaagaatgattgctatcctcacaga
aaactatgggggcaaatggcccttttggctgtcccctcgccaggtaatggtagttccagtgggaccaacctgtgatgaatatgcccaaaaggta
cgacaacaattccacgatgccaaattcatggcagacattgatctggatccaggctgtacattgaataaaaagattcgaaatgcacagttagcaca
gtataacttcattttagttgttggtgaaaaaaaaaaaaaaa

| | | |
|---|---|---|
| T-box 2 | 66 | BC052566, NM_005994, BC070054, AB209378, |
| (TBX2) | | AK127429, U28049 |
| Thy-1 cell | 67 | NM_006288, AF261093, BC005175, AK057865, |
| surface antigen | | AK090996, AK094374 |
| (THY1) | | |
| Tumor necrosis | 68 | BC030205 |
| factor, alpha- | | NM_007115 |
| induced protein | | M31165 |
| 6 (TNFAIP6) | | Sequence below. |

cagtcacatttcagccactgctctgagaatttgtgagcagcccctaacaggctgttacttcactacaactgacgatatgatcatcttaatttacttattt
ctcttgctatgggaagacactcaaggatggggattcaaggatggaatttttcataactccatatggcttgaacgagcagccggtgtgtaccacag
agaagcacggtctggcaaatacaagctcacctacgcagaagctaaggcggtgtgtgaatttgaaggcggccatctcgcaacttacaagcagc
tagaggcagccagaaaaattggatttcatgtctgtgctgctggatggatggctaagggcagagttggataccccattgtgaagccagggccca
actgtggatttggaaaaactggcattattgattatggaatccgtctcaataggagtgaaagatgggatgcctattgctacaacccacacgcaaag
gagtgtggtggcgtctttacagatccaaagcaaatttttaaatctccaggcttcccaaatgagtacgaagataaccaaatctgctactggcacatta
gactcaagtatggtcagcgtattcacctgagtttttagattttgaccttgaagatgacccaggttgcttggctgattatgttgaaatatatgacagtta
cgatgatgtccatggctttgtgggaagatactgtggagatgagcttccagatgacatcatcagtacaggaaatgtcatgaccttgaagtttctaag
tgatgcttcagtgacagctggaggtttccaaatcaaatatgttgcaatggatcctgtatccaaatccagtcaaggaaaaaatacaagtactacttct
actggaaataaaaactttttagctggaagatttagccacttataaaaaaaaaaaaaaggatgatcaaaacacacagtgtttatgttggaatcttttgg
aactcctttgatctcactgttattattaacatttatttattatttttctaaatgtgaaagcaatacataatttagggaaaattggaaaatataggaaacttta
aacgagaaaatgaaacctctcataatcccactgcatagaaataacaagcgttaacattttcatatttttttctttcagtcatttttctatttgtggtatatgt
atatatgtacctatatgtatttgcatttgaaattttggaatcctgctctatgtacagttttgtattatactttttaaatcttgaactttataaacattttctg
aaatcattgattattctacaaaaacatgattttaaacagctgtaaaatattctatgatatgaatgttttatgcattatttaagcctgtctctattgttggaat
ttcaggtcattttcataaatattgttgcaataaatatccttgaacacaaaaaaaaaaaaaaaaaa

| | | |
|---|---|---|
| Tumor necrosis | 69 | BC010241, BC017730, NM_014452, AY358304, |
| factor receptor | | BC005192, BC015466, AB209394, AJ420531 |
| superfamily, | | Sequence below. |
| member 21 | | |
| (TNFRSF21) | | |
| (DR6) | | |

gccaccttgtctgtgagctccctgtgccccccatacggtgtgtcctgtgggttggggtgtgcggaagaaagggacagagactgaggatgtgcg
gtgtaagcagtgtgctcggggtaccttctcagatgtgccttctagtgtgatgaaatgcaaagcatacacagactgtctgagtcagaacctggtgg
tgatcaagccggggaccaaggagacagacaacgtctgtggcacactcccgtccttctccagctccacctcaccttcccctggcacagccatctt
tccacgccctgagcacatggaaacccatgaagtcccttcctccacttatgttcccaaaggcatgaactcaacagaatccaactcttctgcctctgt
tagaccaaaggtactgagtagcatccaggaagggacagtccctgacaacacaagctcagcaagggggaaggaagacgtgaacaagaccct
cccaaaccttcaggtagtcaaccaccagcaaggcccccaccacagacacatcctgaagctgctgccgtccatggaggccactgggggcga
gaagtccagcacgcccatcaagggccccaagaggggacatcctagacagaacctacacaagcattttgacatcaatgagcatttgccctggat
gattgtgcttttcctgctgctggtgcttgtggtgattgtggtgtgcagtatccggaaaagctcgaggactctgaaaaaggggccccggcaggatc
ccagtgccattgtggaaaaggcagggctgaagaaatccatgactccaacccagaaccgggagaaatggatctactactgcaatggccatggt
atcgatatcctgaagcttgtagcagcccaagtgggaagccagtggaaagatatctatcagtttctttgcaatgccagtgagagggaggttgctgc
tttctccaatgggtacacagccgaccacgagcgggcctacgcagctctgcagcactggaccatccggggccccgaggccagcctcgccca
gctaattagcgccctgcgccagcaccggagaaacgatgttgtggagaagattcgtgggctgatggaagacaccacccagctggaaactgac
aaactagctctcccgatgagccccagcccgcttagcccgagccccatccccagccccaacgcgaaacttgagaattccgctctcctgacggt
ggagccttccccacaggacaagaacaagggcttcttcgtggatgagtcggagccccttctccgctgtgactctacatccagcggctcctccgc
gctgagcaggaacggttcctttattaccaaagaaaagaaggacacagtgttgcggcaggtacgcctggacccctgtgacttgcagcctatcttt
gatgacatgctccactttctaaatcctgaggagctgcgggtgattgaagagattccccaggctgaggacaaactagaccggctattcgaaattat
tggagtcaagagccaggaagccagccagaccctcctggactctgtttatagccatcttcctgacctgctgtagaacatagggatactgcattctg
gaaattactcaatttagtggcagggtggttttttaatttcttctgtttctgatttttgttgtttggggtgtgtgtgtgtgtttgtgtgtgtgtgtgtgtgtgt
gtgtgtgtgtgtttaacagagaatatggccagtgcttgagttctttctccttctctctctctcttttttttttaaataactcttctgggaagttggtttataa
gcctttgccaggtgtaactgttgtgaaatacccaccactaaagttttttaagttccatattttctccattttgccttcttatgtattttcaagattattctgt
gcactttaaatttacttaacttaccataaatgcagtgtgacttttcccacacactggattgtgaggctcttaacttcttaaaagtataatggcatcttgtgaa
tcctataagcagtctttatgtctcttaacattcacacctactttttaaaaacaaatattattactatttttattattgtttgtcctttataaattttcttaaa
gattaagaaaatttaagaccccattgagttactgtaatgcaattcaactttgagttatcttttaaatatgtcttgtatagttcatattcatggctgaaacttg
accacactattgctgattgtatggttttcacctggacaccgtgtagaatgcttgattacttgtactcttcttatgctaatatgctctgggctggagaaatgaa
atcctcaagccatcaggatttgctatttaagtggcttgacaactgggccaccaaagaacttgaacttcaccttttaggatttgagctgttctggaac
acattgctgcactttggaaagtcaaaatcaagtgccagtggcgccctttccatagagaatttgcccagctttgctttaaaagatgtcttgttttttatat
acacataatcaataggtccaatctgctctcaaggccttggtcctggtgggattccttcaccaattactttaattaaaaatggctgcaactgtaagaac
ccttgtctgatatatttgcaactatgctcccatttacaaatgtaccttctaatgctcagttgccaggttccaatgcaaaggtggcgtggactccctttg
tgtgggtggggtttgtgggtagtggtgaaggaccgatatcagaaaaatgccttcaagtgtactaatttattaataaacattaggtgtttgttaaaaaa
aaaaaaaaa

| | | |
|---|---|---|
| Uridine | 70 | BC001405, BC047030, BC053592, X90858 |
| phosphorylase 1 | | |
| (UPP1) | | |

### Example 3

### Further Validation of TVM

[0368] To test the specificity of identified genes to tumors relative to normal tissues, previously uninvestigated genes were selected from the above candidates for further validation. As positive controls for our assays, known TVM were included. First, 12 selected TVM were tested for enrichment of expression in ovarian tumors versus normal ovarian tissue, by analyzing their whole tissue expression by qRT-PCR in an independent set of stage-III ovarian cancers (n=20) and normal ovaries (n=5). All 12 TVM tested were upregulated in cancer tissue versus normal ovaries (p<0.05 for all). Many TVM were expressed at or below the lowest limits of detection in normal ovaries (FIG. 3A). TVM expression in normal tissues was also examined by analyzing pre-existing SAGE data (Boon K et al, An anatomy of normal and malignant gene expression. Proc Natl Acad Sci USA 2002 Aug. 20; 99(17):11287-92.) (FIG. 3E). Genes exhibiting no or minimal in silico expression in normal tissues were then screened in a panel of normal tissues with qRT-PCR (FIG. 3B). All TVM tested, except for C11orf8 and FJX1, were highly expressed in tumors and were expressed at or below the lowest limits of detection in normal tissues tested. C11orf8 was significantly enriched in TVC relative to all cell types tested, and was expressed at or below the lowest limit of detection in all cell types except brain and spleen. FJX1 was significantly enriched in TVC relative to all cell types tested except for spleen.

[0369] Quantitative Real-time Polymerase Chain Reaction (qRT-PCR) was used to evaluate the expression of select TVM in different malignancies, including lung cancer, mesothelioma, breast cancer and melanoma (FIG. 3C). To ensure expression differences were not due to differences in vascular density, the qRT-PCR data were normalized against CD31 expression, a reliable marker of endothelial cells. Collagen 11α1 was expressed at even higher levels in breast and lung relative to ovarian tumors, LZTS1 was relatively specific for melanoma and ovarian cancer, and FZD10 and EMBPL1 was relatively specific for ovarian tumors. Other TVM exhibited quantitative differences in expression among different tumor types, indicating that, under the conditions utilized, TVC signatures differ among tumor types.

[0370] In addition, TVM that exhibited minimal expression in normal tissues were evaluated for expression in tissues with physiologic angiogenesis including corpus luteum, proliferative endometrium and placenta. Data were normalized against CD31 expression. Some of the TVM (adlican, collagen 11α1, F2RL1, GPM6B and STC2) were expressed at 40-350 fold higher levels in tumor versus tissues with physiologic angiogenesis (FIG. 3D). However, EGFL6, OLFML2B and previously established TVM such as TEM-1 and TEM-7 were expressed in reproductive tissues with physiologic angiogenesis.

[0371] These findings further validated the identified proteins and transcripts as TVM. Expression of the TVM in other tumors besides ovarian cancer show that their utility (e.g. in tumor localization and diagnostic and therapeutic methods) is not limited to ovarian tumors, but rather includes many other solid tumors. In addition, these findings validated the methods used in the present invention for identifying TVM, with regard to both those TVM tested in vivo and those not yet tested in vivo.

### Example 4

### Localization of TVM Expression to Tumor Vasculature

[0372] To confirm that genes identified through immuno-LCM and transcriptional profiling were localized to ovarian cancer tumor vasculature, immunohistochemistry (IHC) was performed. Both CD24 (FIG. 4) and CD74, normally expressed by hematopoietic cells of the monocytic/macrophage lineage, but also reported as expressed in endothelium, were clearly expressed in ovarian tumor vessels. Endothelial lipase and FolH1, genes previously identified as expressed in tumor vasculature, were also expressed in ovarian tumor endothelium. SPON-1 was also found to be expressed in a vascular pattern. PAR2 (F2RL1) was localized primarily in peri-endothelial location, while STC2 co-localized with CD31 expression. AML-1 was expressed in stromal cells, but also in vascular structures by IHC (FIG. 4, second row). In addition, AML-1 expression was only detected in small tumor vessels, but was absent in large, smooth muscle actin-positive, mature vessels. Double immunofluorescence indicated that AML-1 co-localized with CD31 expression (FIG. 4, last row); localization in adjacent cells could not be excluded, however.

[0373] For TVM against which antibodies were unavailable, expression in tumor vasculature was confirmed using in-situ hybridization (ISH). ISH revealed clear expression of GPM6B, adlican, TNFαIP6, FZD10, EGFL6, DR6 and FJX1 in 5 independent ovarian cancer samples (FIG. 5). TVM were detected in vascular structures and were absent in tumor cells. Expression was generally limited to small neo-vascular structures, and with the exception of FZD10, was absent in large, muscular vessels. With the exception of FJX1, which was detected at very low levels in normal ovarian vasculature, TVM were not detected in 3 independent normal ovary specimens. No specific staining was observed with sense strand RNA controls, showing that the signals observed accurately reflected expression of the RNA molecules measured. Pre-treatment of slides with RNAse prior to probe hybridization eliminated all specific staining for all TVM tested, providing an additional control for veracity of the data.

[0374] These findings confirm that the identified TVM were expressed in tumor vasculature.

### Example 5

### TVM Expression in Different TVC

[0375] To test which cells in the tumor vasculature express the identified TVM, mRNA expression was evaluated by qRT-PCR in VE-cadherin⁺ CD146⁺ CD45⁻ tumor endothelial cells (TEC) isolated freshly by FACS from ovarian cancer specimens. TVM expression in VE-cadherin⁺ CD146⁺ CD45⁺ vascular leukocytes (VLC); myeloid cells with vasculogenic potential; and control peripheral blood mononuclear cells (PBMC) was also tested. All TVM were expressed by VLC, and all except AML-1 were expressed by purified TEC (FIG. 6). Adlican, EGFL6, FJX1, FZD10, GPM6B and SPON-1 were expressed at approximately 10-fold higher levels in TEC than VLC. TEC expressed these genes at greater than 100-fold higher levels than PBMC. BCM-like membrane protein precursor (BLAME) was higher in VLC (and PBMC) than TEC, and TNFαIP6 was higher in TEC and VLC than PBMC. AML-1 demonstrated highest expression in PBMC and intermediate in VLC, while it was nearly absent in TEC. Thus, genes identified through immuno-LCM and transcriptional profiling are expressed by TVC, at different levels in TEC and VLC.

[0376] Thus, expression of most TVM tested in tumor endothelial cells provided still further evidence that the TVM identified were genuine, and that cell contamination did not occur during immuno-LCM.

### Example 6

### Dendritic Cell Precursors Upregulate TVM Under the Influence of VEGF-A

[0377] To address the origin of human VLC, DC were generated from human PBMC with GM-CSF and IL-4 (Benencia F et al, HSV oncolytic therapy upregulates interferon-inducible chemokines and recruits immune effector cells in ovarian cancer. Mol. Ther. 2005 November; 12(5):789-802). FACS analysis demonstrated 100% CD45 expression in these cells (FIG. 7A, top left). DC were then labeled with CFSE and treated with recombinant human (rh)VEGF₁₆₅ for 7 days. VEGF₁₆₅ induced significant up-regulation of VE-cadherin in a population of PBMC-derived DC (FIG. 7A, top right). The monocyte fraction of PBMC was primarily responsible for giving rise to the VE-cadherin⁺ CD45⁺ population upon treatment with VEGF₁₆₅ (FIG. 7A, middle). Lack of CFSE dye dilution with VEGF-A treatment indicated that the phenotype switch was not due to expansion of endothelial progenitor contaminants (FIG. 7A, bottom). In addition, endothelial progenitor assays performed with these cells demonstrated no proliferation. Thus, under the conditions utilized, VEGF-A induces monocyte-derived DC to acquire VLC features.

[0378] To test whether VEGF₁₆₅ treatment induced TVM in human PBMC-derived DC, expression of collagen 11α1, DR6, FZD10, GPM6B, SCP1, SPON-1, and TEM-1 was measured, following VEGF₁₆₅ treatment. All these transcripts were markedly up-regulated, and VEGF-neutralizing antibody abrogated their up-regulation (FIG. 7B). Expression of AML-1 and LZTS1 were down-regulated in DC by VEGF₁₆₅. This down-regulation was abrogated by anti-VEGF-A antibody in 3-day cultures but not after 2 weeks of VEGF₁₆₅ treatment. Other TVM, such as adlican and SLIT2, were not up-regulated in DC by VEGF₁₆₅ treatment, showing that, under the conditions utilized, other mediators besides VEGF-A were necessary to complete the full differentiation of these cells into VLC.

### Example 7

### DC Precursors Contribute to Tumor Vasculature and Express a Larger Repertoire of TVM In Vivo

[0379] To determine whether additional TVC could be contributed by DC in vivo, human PBMC-derived DC were treated with rhVEGF₁₆₅ for one week in vitro, admixed with 2008 human ovarian cancer cells (1:10; DC, tumor cell) and transplanted within Matrigel® into NOD/SCID/β2M−/− recipient mice. As controls, 2008 cells were injected alone, or co-injected together with FACS-isolated TEC or VLC in the opposite side. Tumors were assessed for expression of TVM 3 weeks later using qRT-PCR. Three TVM, adlican, FJX1 and STC2, as well as known TVM, SLIT2 and TEM-1, were clearly detected in tumor xenografts enriched with human VEGF-treated DC, VLC or TEC, while they were not detected in tumors generated with tumor cells alone (FIG. 7C). Immunofluorescence analysis to identify human endothelium using antibodies specific to human (h)CD34 and hCD31 identified small clusters of human vascular structures in tumors enriched with rhVEGF-treated DC, VLC or TEC (FIG. 7D). No staining for human endothelium was identified when 2008 cells were injected alone. These cells exhibited markers and in vivo behavior that were similar to tumor-derived VLC, showing that certain tumor VLC derive from myeloid DC.

[0380] Induction of TVM by VEGF-A in vitro was not due to expansion of contaminating endothelial precursor cells, as shown by negative CFSE dilution and endothelial progenitor cell assays. When VEGF-treated DC were exposed to the tumor microenvironment in vivo, additional TVM could be induced, showing that, under the conditions utilized, in vivo factors further contribute to acquisition of a VLC phenotype by DC. Importantly, tumors enriched with VEGF-treated DC exhibited vascular structures expressing human CD31 and CD34, while control tumors generated with only tumor cells did not. Thus, tumor cells were not responsible for the expression of TVM in vivo.

[0381] Thus, human VEGF-primed monocyte-derived DC can give rise to vascular cells in tumors. These findings demonstrate that many of the novel TVM identified are expressed by vascular cells of myeloid lineage.

### Example 8

### Identification of Additional Transmembrane and Secreted TVM

[0382] The tumor vasculature-specific genes identified in Example 2 were further analyzed by t-statistics, ranked and nonparametric analyses, and Genespring®. Over 200 genes were identified that were either exclusively expressed in tumor ECs or significantly overexpressed in tumor ECs and absent in 75% of normal ECs. From among these genes, transcripts were then identified that encoded proteins that were transmembrane or secreted, based on known structure or sequence analysis. The 108 transcripts identified are listed and described in FIG. 8. GenBank Accession Numbers of the new plasma membrane-associated, (“PM”), transmembrane (TM), extracellular matrix (ECM), and secreted TVM (those that do not appear in Table 6) are set forth in Table 7.

TABLE 7
Sequences of the new transmembrane and secreted TVM. Each GenBank Accession
No. represents a separate embodiment of the present invention.

| | Localization; | |
|---|---|---|
| | SEQ ID | |
| Gene name | Number | Exemplary GenBank Accession Numbers |
| IBSP (Integrin-binding | Secreted; 89 | NM_004967, J05213, NP_004958 |
| sialoprotein) | | |
| FAD104 (FNDC3B; | TM; 90 | NM_022763, BC033635, AK127826, |
| Fibronectin type III domain | | AL157482, BC039297, BC012204, |
| containing 3B) | | AF543840, AY358146, AY358367, |
| | | AK027052, AK075220, AB098597, |
| | | AK223599, AL157482 |
| WARP (Von Willebrand | TM; 91 | AK096773, 30349211, NM_199121, |
| factor A domain containing | | BC059409, NM_022834, AK025868 |
| 1) | | |
| B-cell receptor-associated | ER/TM; 92 | NM_018844, AF126020, |
| protein 29 (BCAP29) | | NM_001008405, NM_001008406, |
| | | NM_001008407, BC008478, |
| | | AF126020, BT006981. |
| CDH1 (Cadherin 1, type 1, | TM; 93 | NM_004360, Z13009, L08599, |
| E-cadherin (epithelial) | | AB025105, AB025106, X12790, |
| | | X52279, Z18923. |
| FLJ10826 (OGFOD1; 2- | TM; 94 | NM_018233, AK024314, BC032919, |
| oxoglutarate and iron- | | NM_001031707, BC032919, |
| dependent oxygenase | | AK001688, AB046832, AK022130, |
| domain containing 1) | | AK022752 |
| OPN3 (Opsin 3; | TM; 95 | AK000933, BC036773, |
| encephalopsin, panopsin) | | NM_001030011, NM_001030012, |
| | | NM_014322, AF140242, BC036773, |
| | | BC062622, BC073872, AF303588 |
| HIATL2 (Hippocampus | TM; 96 | BC005058, NM_032318, XM_939817 |
| abundant gene transcript- | | |
| like 2) | | |
| IL28RA (Interleukin 28 | TM; 97 | NM_170743, NM_173064, |
| receptor, alpha; interferon, | | NM_173065, AF439325, AK160364, |
| lambda receptor) | | BC101408, BC101975, AY129151, |
| | | AY129152, AY129153, AK160364, |
| | | AF439325, AJ534330, AJ534331 |
| TMEM19 (Transmembrane | TM; 98 | BC008596, NM_018279, BC008596, |
| protein 19) | | AK001798, AK223148 |
| C10orf69 (SPFH domain | PM; 99 | BC031791, NM_006459, AK127017, |
| family, member 1) | | AF064093, AK222480 |
| FRAP1 (FK506 binding | PM; 100 | NM_004958, AB209995, L34075, |
| protein 12-rapamycin | | L35478 |
| associated protein 1) | | |
| CKLFSF6 (CKLF-like | TM/ | BC002797, AK000403, NM_017801, |
| MARVEL transmembrane | Secreted; 101 | AF116694, BC027472, AF479261, |
| domain containing 6) | | CR457231 |
| MPHOSPH9 (M-phase | PM/Golgi | X98258, NM_022782, AK023016, |
| phosphoprotein 9) | stacks; 102 | NP_073619 |
| CLST11240 (HIGD1B; | TM; 103 | BC020667, NM_016438, NM_004247, |
| HIG1 domain family, | | BC002360, D21163, AB038021, |
| member 1B) | | AB038022, AJ505017, CR456774 |
| MS4A6A (Membrane- | TM; 104 | BC022854, AF237908, AF253977, |
| spanning 4-domains, | | AF261136, AF286866, AF350502, |
| subfamily A, member 6A) | | AB013104, AF212240, BC108728, |
| | | NM_022349, NM_152851, NM_152852 |
| SGPP2 (Sphingosine-1- | TM; 105 | BC047944, NM_152386, BC106904, |
| phosphate phosphatase 2) | | BC106905, AF542512, AK096323, |
| | | XM_938742 |
| SLC11A1 (Solute carrier | TM; 106 | BC071165, L32185, NM_000578, |
| family 11; proton-coupled | | NM_001032220, BC041787, D38171, |
| divalent metal ion | | D50402, D50403, AB209650 |
| transporters, member 1) | | |
| SLCO3A1 (Solute carrier | TM; 107 | AF205074, NM_013272, AB031050, |
| organic anion transporter | | AK057031, BC000585, AF187816, |
| family, member 3A1) | | BC000585, XM_941061, XM_944958, |
| | | XM_944959 |
| LOC51136 (PTD016 | TM; 108 | BC006971, BC088365, NM_016125, |
| protein) | | AK098649, AF100745, NP_057209 |
| HAPLN1 (Hyaluronan and | ECM; 109 | BC057808, NM_001884, U43328, |
| proteoglycan link protein 1) | | BC057808, X17405 |
| DKFZp564I1922 (MXRA5 | PM; 110 | AK129884, AK130102, NM_000175, |
| (Matrix-remodelling | | NM_015419, K03515, AF245505, |
| associated 5) | | BC004982, BC006342, BC011846, |
| | | BC064986, BC080586, AL049946 |
| KCNE3 (Potassium | TM; 111 | NM_005472, BC113743, BC110612, |
| voltage-gated channel, Isk- | | AF076531, AF302494, DQ192291, |
| related family, member 3) | | DQ192292, CR457209, CR936625 |
| CALM3 (Calmodulin 3; | PM/ | BC005137, BC006182, AL050207, |
| phosphorylase kinase, | cytoplasm; | NM_005184, AK094964, J04046, |
| delta) | 112 | BT006855 |
| KCNE4 (Potassium | TM; 113 | BC014429, NM_080671, AY065987, |
| voltage-gated channel, Isk- | | DQ192293 |
| related family, member 4) | | |
| MGC34647 | TM; 114 | BC029804, NM_152456, AK172744, |
| | | BC029804 |
| MUC1 (Mucin 1, | TM; 115 | NM_001018016, NM_001018017, |
| transmembrane) | | NM_001018021, J05581, NM_002456, |
| | | M34088, M34089, M31823, M32738, |
| | | M32739, M26316, J05582, M21868, |
| | | U60259, U60260, U60261, S81736, |
| | | AY327582-AY327600, AY466157, |
| | | Z17324, Z17325 |
| SDC1 (Syndecan 1) | TM; 116 | NM_001006946, NM_002997, |
| | | AJ551176, BC008765, J05392, |
| | | BC008765, AK222739, X60306 |
| SLC30A6 (Solute carrier | PM; 117 | AL832755, BC032525, BC066903, |
| family 30 (zinc | | NM_017964, BC066903, AK055663 |
| transporter), member 6) | | |
| ST14 (Suppression of | TM; 118 | BC030532, NM_021978, AB030036, |
| tumorigenicity 14 (colon | | AF057145, AF118224, BC005826, |
| carcinoma)) | | BC018146, |
| CDCP1 (CUB domain | TM; 119 | AK026329, NM_022842, NM_178181, |
| containing protein 1) | | BC021099, BC069254, AY026461, |
| | | AF468010, AY167484 |
| LOC116238 (TLCD1) | TM; 120 | BC014072, NM_138463 |
| WFDC2 (WAP four- | Secreted; 121 | BC046106, NM_006103, BC039816, |
| disulfide core domain 2) | | X63187, NM_080733, AF330259, |
| | | NM_080734, NM_080736, AF330260 |
| SPTB; Spectrin, beta, | PM/ | NM_000347, X59511, |
| erythrocytic (includes | cytoskeleton; | NM_001024858, M37885, J05500, |
| spherocytosis, clinical type | 122 | AF465439, X59510, X59511, |
| I) | | BX248270 |
| FNDC3 (Fibronectin type | TM; 123 | NM_014923, BC060816, BC070072, |
| III domain containing 3A) | | BX648706, AK001140, AJ749706, |
| | | AJ749707 |
| SPRY1 (Sprouty homolog | Cytoplasm/ | BC063856, NM_005841, NM_199327, |
| 1, antagonist of FGF | lamelli- | AF041037, AK026960, AY590694 |
| signaling (Drosophila) | podium | |
| | membrane; | |
| | 124 | |
| MME (Membrane metallo- | TM; 125 | AL833459, NM_000902, NM_007287, |
| endopeptidase; neutral | | NM_007288, NM_007289, J03779, |
| endopeptidase, | | BC106070, BC101632, BC101658 |
| enkephalinase, CALLA, | | |
| CD10) | | |
| TOMM22 (Translocase of | mitochondrial | BC009363, NM_020243, AK024731, |
| outer mitochondrial | outer | AB041906 |
| membrane 22 homolog | membrane; | |
| (yeast)) | 126 | |
| SPP1 (Secreted | Secreted; 127 | BC007016, BC017387, BC022844, |
| phosphoprotein 1 | | BC093033, NM_000582, AF052124, |
| (osteopontin, bone | | BX648003, AK057738, AK075463, |
| sialoprotein I, early T- | | J04765, X13694, D28759, D28760, |
| lymphocyte activation 1) | | D28761, M83248 |
| INSR (Insulin receptor) | TM; 128 | BC117172, AL365454, NM_000208, |
| | | M10051, M24555, BC047591, |
| | | AB208861, X02160, NP_000199 |
| LPPR4 (Plasticity related | TM; 129 | NM_014839, AF357013, AF541281, |
| gene 1) | | BC042963, AY304518, AB007924, |
| | | AL834390 |
| C14orf100 | TM; 130 | BC005198, BC010359, NM_016475, |
| | | AF212245, AF529304, AK021683, |
| | | AK056145, AK128628 |
| SLC9A5 (Solute carrier | TM; 131 | NM_004594, AF111173, AL137689, |
| family 9 (sodium/hydrogen | | AB209203, NP_004585 |
| exchanger), member 5 | | |
| SCGB2A1 (Secretoglobin, | TM; 132 | BC062218, AJ224173, NM_002407, |
| family 2A, member 1) | | AF071219, BC062218 |
| FLT1 (Fms-related | Secreted/ | BC039007, NM_002019, S77812, |
| tyrosine kinase 1 (vascular | PM; 133 | S77814, AF063657, U01134, |
| endothelial growth | | BC039007, AB209050 |
| factor/vascular permeability | | |
| factor receptor) | | |
| C2orf6 (MOBK1B; MOB1, | TM; 134 | NM_018221, AK001650, AK023321, |
| Mps One Binder kinase | | BC003398, AK021657, AB016839, |
| activator-like 1B) | | AJ577474 |
| TMEM2 (Transmembrane | TM; 135 | BC044850, AB037833, NM_013390, |
| protein 2) | | AF137030, AK075370 |
| ACTR3 (ARP3 actin- | Arp2/3 | BC044590, NM_005721, AF006083 |
| related protein 3 homolog | protein | |
| (yeast)) | complex*; | |
| | 136 | |
| TMEM8 (Transmembrane | TM; 137 | BC021557, NM_021259, AB045292, |
| protein 8; five membrane- | | AK024725, AK091823, |
| spanning domains) | | |
| SLC5A4 (Solute carrier | TM; 138 | NM_014227, AJ133127, U41897 |
| family 5 (low affinity | | |
| glucose cotransporter), | | |
| member 4) | | |
| MEST (Mesoderm specific | TM; 139 | BC002413, BC011908, BC014564, |
| transcript homolog (mouse) | | BC018695, BC090049, NM_002402, |
| | | NM_177524, NM_177525, D78611, |
| | | D87367, Y11534 |
| CHODL (Chondrolectin) | TM; 140 | BC009418, NM_024944, AF257472, |
| | | AF523313, AF523314, AF523315, |
| | | AY358608 |
| TRIO; Triple functional | TM; 141 | AB115332, AK131423, NM_007118, |
| domain (PTPRF | | U42390, AF091395, BC017268, |
| interacting) | | BC035585, AB209754 |
| IL10RA (Interleukin 10 | TM; 142 | BC028082, NM_001558, AB209626, |
| receptor, alpha) | | U00672, BC028082 |
| LGALS3BP (Lectin, | ECM/PM; | BC002403, BC002998, BC015761, |
| galactoside-binding, | 143 | NM_005567, AK055977, AK057776, |
| soluble, 3 binding protein) | | L13210, X79089 |
| STK4 (Serine/threonine | TM/nucleus; | NM_006282, AK027088, BC042861, |
| kinase 4) | 144 | AB209315, BC093768, U18297, |
| | | U60207, BC005231 |
| ERBB3 (V-erb-b2 | TM; 145 | AK125028, NM_001982, |
| erythroblastic leukemia | | NM_001005915, BC082992, M29366, |
| viral oncogene homolog 3 | | M34309, S61953, U88357, U88358, |
| (avian) | | U88359, U88360, BC002706 |
| C14orf28 | TM; 146 | NM_001017923, BC105030, |
| | | BC105032, BC030258, AF250395 |
| KIAA1024 | TM; 147 | AF035294, AB028947, NM_015206 |
| CCL15 (chemokine (C-C | Secreted; 148 | NM_032965, NM_004167, |
| motif) ligand 15) | | NM_032964, NG_003025, DR005483 |
| PLA2G2D (Phospholipase | Secreted; 149 | AF112982, BC025706, NM_012400, |
| A2, group IID) | | AF188625 |
| KIAA1906 | TM; 150 | BC113366, AB067493, NM_020203, |
| | | AL080061, AB209172, AK090767, |
| | | NM_052907, AK093097 |
| F3; Coagulation factor III | TM; 151 | X07680, NM_001993, AF497569, |
| (thromboplastin, tissue | | AF497570, J02931, M16553, M27436 |
| factor) | | |
| PCDHB2 (Protocadherin | TM; 152 | BC098575, NM_018936, AF217756, |
| beta 2) | | AK027526, BC098347, AF152495, |
| | | BC098347 |
| KIAA0703 | TM; 153 | AK025424, AY791884, AK092737, |
| | | NM_014861, AB014603, CR749829, |
| | | BX648333 |
| C1orf10 (CRNN; Cornulin) | TM; 154 | BC030807, NM_016190, AF077831, |
| | | BC030807 |
| POLYDOM (SVEP1 | TM; 155 | AL079279, AL832416, AJ619977, |
| (Sushi, von Willebrand | | AK075200, AK075234, AY243503, |
| factor type A, EGF and | | AY916667, BX537918 |
| pentraxin domain | | |
| containing 1) | | |
| TUBAL3 (Tubulin, alpha- | TM; 156 | NM_024803, AK025318, BC098247, |
| like 3) | | BC105634, BC099716 |
| GPR105 (Purinergic | TM; 157 | BC034989, NM_014879, D13626 |
| receptor P2Y, G-protein | | |
| coupled, 14) | | |
| CNTN6 (Contactin 6) | PM; 158 | NM_014461, AB003592, BC113118, |
| | | BC113118 |
| IL7R (Interleukin 7 | TM; 159 | AF373204, AL713738, BC067537, |
| receptor) | | BC069999, BC067539, BC067540, |
| | | M29696 |
| ARHGAP18 (Rho GTPase | TM; 160 | BC017223, BC039611, BC052295, |
| activating protein 18) | | BC062417, BC107416, BC101708, |
| | | BC111940 |
| GRM1 (Glutamate | TM; 161 | NM_000838, AB208837, L76627, |
| receptor, metabotropic 1) | | U31215, U31216, L76631 |
| PREX1 (Phosphatidyl- | PM/cytosol; | BC009948, BC053616, NM_020820, |
| inositol 3,4,5-trisphosphate- | 162 | AB037836, AJ320261, AL136579, |
| dependent RAC exchanger | | AL832913 |
| 1) | | |
| MUC3A (Mucin 3A, | ECM/TM; | AW842071, M55405, M55406, |
| intestinal) | 163 | AF007194, AF143373 |
| LTBP2 (Latent | ECM; 164 | BC078659, S82451, Z37976, |
| transforming growth factor | | NM_000428, AF113211, AB209865 |
| beta binding protein 2) | | |
| EPSTI1 (Epithelial stromal | TM; 165 | BC023660, NM_033255, AF396928, |
| interaction 1 (breast)) | | NM_001002264, AL831953 |
| UBE2J1 (Ubiquitin- | TM/ER; 166 | BC013973, U93243, NM_016021, |
| conjugating enzyme E2, J1 | | AF151834, AF161502, AF151039, |
| (UBC6 homolog, yeast) | | AK223464 |

*These complexes are associated with actin filaments, some of which are localized to the plasma membrane.

### Example 9

### Further Testing of Transmembrane and Secreted TVM

### Materials and Experimental Methods

[0383] Cell-free, in vitro rapid translation System® (RTS) technology (Roche Applied Science) is used to produce whole proteins or polypeptides derived from extracellular regions.

### Results

[0384] The new transmembrane and secreted TVM identified in Example 8 are tested for enrichment of expression in ovarian tumors versus normal ovarian tissue and in different malignancies and tissues with physiologic angiogenesis, as described in Example 3. In other experiments, frozen specimens are used. In other experiments, paraffin-embedded specimens are used. Alternatively, the new TVM are used to localize ovarian cancer tumor vasculature using IHC or ISH, as described in Example 4. In another embodiment, double immuno-staining for CD31 in parallel is used to show co-localization in the endothelium. In another embodiment, antibodies raised against the proteins, or against extracellular fragments thereof, are utilized. In another embodiment, the antibodies are generated using methods described herein. In another embodiment, nucleic acids that hybridize with the identified transcripts are utilized. These experiments confirm that the identified transcripts, and the proteins they encode, are robust TVM.

### Example 10

### Use of Adlican as a Tumor Marker In Vivo

### Materials and Experimental Methods

[0385] Anti-Adlican antibody was produced by Prosci Inc., Poway, Calif.

### Results

[0386] One extracellular matrix marker identified, adlican, was cloned, a fragment of it (CPGAKALSRVREDIVEDE; SEQ ID No: 88) was expressed, and rabbit anti-adlican antiserum was produced and used to screen normal and tumor tissue samples. Adlican was detected by immuno-staining in tumor but not in normal ovary stroma or vasculature. In addition, the antiserum was used to screen serum and ascites of patients with stage III ovarian cancer, and control healthy women. Adlican was detected by Western blot in the tumor samples, but not the control samples (FIG. 9D).

[0387] Thus, TMV of the present invention are efficacious in detecting, localizing, and specifically delivering drugs or anti-tumor agents to tumor cells. In addition, these results show that certain secretory TVM of the present invention are shed into the circulation, where they can function as tumor biomarkers. Thus, tests of biological fluids (e.g. blood, lymph, etc) can be successfully used to screen for tumors using TVM of the present invention.

### Example 11

### Identification of Additional TVM

### Materials and Experimental Methods

[0388] Additional TVM were identified from the list of genes described in Example 1, according to the following criteria: (1) Genes which were determined to be present in 75% of tumor vasculature specimens and absent in normal vasculature; and (2) genes which were present in 75% of tumor vasculature specimens and greater than 5-fold upregulated versus normal ovarian endothelium.

### Results

[0389] Additional TVM were identified; this list overlapped significantly with the list in Table 5. Some of the additional TVM that do not appear in the above tables are set forth in Table 8. Each GenBank Accession No. represents a separate embodiment of the present invention:

| | SEQ ID | Sequence and/or exemplary GenBank |
|---|---|---|
| Gene name; | Number | Accession Numbers |
| HOXA9 | 167 | BC006537, BC010023, NM_152739, |
| (Homeobox A9) | | U41813, NM_002142, U82759, |
| | | BT006990 |
| SLPI (Secretory | 168 | BC020708, NM_003064, X04470, |
| leukocyte peptidase | | X04503, AF114471 |
| inhibitor) | | |
| KIBRA (also | 169 | BC004394, AK001727, NM_015238, |
| known as WWC1; | | BC017746, AF506799, AY189820, |
| WW, C2 and coiled- | | AF530058, AB020676, BX640827 |
| coil domain | | |
| containing 1) | | |

[0390] In vivo expression analyses validated the markers in Table 8 and DEFB1, IL10RA, ADAM12, PCDH17, F-spondin, TNFAIP6, BLAME, AML-1, HEVIN, EPB41L3, SLIT2, and LZTS1, which also were identified in this analysis. Measurement of expression in normal ovarian tissue vs. tumor, and an array of normal tissues vs. tumors, performed as described in the above Examples, both validated each of these markers (FIG. 3).

[0391] Additional TVM identified in the above analysis (besides those enumerated elsewhere herein) were MGAT4A, AFAP, CXCR4, UCP2, TWIST, SLC2A3, MYO1B, COL4A2, MGC4677, GIP2, BHLHB3, NEDL2, and ITGA1 (FIG. 11).

[0392] Thus, as in previous Examples, each of the markers tested in this Example are bona fide TVM.

### Example 12

### Identification of Additional Transmembrane (TM) and Secreted TVM

[0393] Additional TVM were identified from the list of genes described in Example 1, according to the following criteria: A. For each gene, the individual rank values of the 5 normal endothelium samples were summed; the sum of ranks had to be less or equal to 25; (2) AND/OR the fold change (mean tumor to mean normal) had to be greater or equal to 3. From these genes, all genes with either TM or extracellular function were selected.

[0394] The additional TVM are listed in FIG. 12, together with GenBank Accession Numbers for those markers not listed elsewhere herein (SEQ ID No: 170-211). Each GenBank Accession No. represents a separate embodiment of the present invention.

### Example 13

### Development of New Antibodies Against TVM

### Materials and Experimental Methods

### Peptides

[0395] Peptides are synthesized using an Fmoc-based chemical strategy.

### Antibodies

[0396] Antibody production is outsourced to specialized biotechnology companies; e.g. Prosci Inc. (Poway, Calif.). To exclude any Fc fragment-mediated effects that may interfere with Ab specificity, Abs are prepared as F(ab′)₂ fragments.

### Results

[0397] The TVM identified in the above Examples are used as targets for the development of epitope-specific monoclonal (m)Abs and affinity-purified anti-peptide polyclonal (p)Abs. For target screening, affinity-purified pAbs are initially generated. In other experiments, synthetic peptides spanning epitopic regions of 20-30 extracellular hydrophilic residues from secretory or transmembrane proteins from the above Examples are synthesized. In another embodiment, the epitopic regions of extracellular hydrophilic residues are deduced based on their primary sequence.

[0398] Monoclonal antibodies to whole proteins are generated for promising candidates.

[0399] The work described herein generates and identifies mAb and pAb for screening and validation studies. Certain of these Abs are also suitable to clinical applications for serum cancer diagnostics, e.g. as described below

### Example 14

### Identification of Additional TVM Using Phage Display Libraries

### Materials and Experimental Methods

### Phage Display Libraries

[0400] To derive human Abs, a non-immune library of phage-displayed human single-chain Fv Abs is generated.

### Construction of the VH Library

[0401] Total RNA is prepared from ovarian cancer cells and normal ovary samples. cDNA is synthesized from total RNA primed with the HuIgMFOR primer (TGGAAGAGGCACGTTCTTTTCTTT; SEQ ID No: 71). VH gene repertoires are amplified from the cDNA by using Vent DNA polymerase (New England Biolabs) in combination with the HuIgMFOR primer and an equimolar mixture of HuVHBACK primers (CAGGTGCAGCTGGTGCAGTCTGG- SEQ ID No: 72-CAGGTCAACTTAAGGGAGTCTGG- SEQ ID No: 73; GAGGTGCAGCTGGTGGAGTCTGG- SEQ ID No: 74; CAGGTGCAGCTGCAGGAGTCGGG- SEQ ID No: 75; CAGGTACAGCTGCAGCAGTCAGG- SEQ ID No: 76). PCR products are agarose gel-purified and re-amplified to append NcoI and NotI restriction sites by using Tth DNA polymerase (Epicentre Technologies, Madison, Wis.) and an equimolar mixture of the HuVHBACK Sfi primers (GTCCTCGCAACTGCGGCCCAGCCGGCCATGGCCCAGGTCAACTTAAGGGAG TCTGG- SEQ ID No: 77) GTCCTCGCAACTGCGGCCCAGCCGGCCATGGCCGAGGTGCAGCTGGTGGAG TCTGG-- SEQ ID No: 78; GTCCTCGCAACTGCGGCCCAGCCGGCCATGGCCCAGGTGCAGCTGCAGGAG TCGGG- SEQ ID No: 79; GTCCTCGCAACTGCGGCCCAGCCGGCCATGGCCCAGGTGCAGCTGTTGCAGTCTGC-SEQ ID No: 80; GTCCTCGCAACTGCGGCCCAGCCGGCCATGGCCCAGGTACAGCTGCAGCAG TCAGG-SEQ ID No: 81) and the HuCMFor Not primer (5′-GAGTCATTCTCGACTTGCGGCCGCTGGAAGAGGCACGTTCTTTTCTTT-3′; SEQ ID No: 82). The PCR products are digested with NcoI and NotI and agarose gel-purified. The resulting DNA fragments are ligated into the plasmid pCITE3A (Novagen; any plasmid that contains the proper restriction sites for cloning and unique sequences for PCR amplification works as well) and cut with restriction enzymes NcoI and NotI, and the ligated DNA is electroporated into the E. coli strain TG1. If desired, cloning efficiency and library diversity ix determined by PCR screening.

Construction of the scFv Library

[0402] The VH gene repertoire is PCR-amplified from the pCITE-VH library by using 300 ng of library plasmid DNA as a template, Vent DNA polymerase, the CITE3 primer (GATCTGATCTGGGGCCTCGGTGC-SEQ ID No: 83), and an equimolar mixture of HuJH primers. The VL genes for scFv assembly are obtained from an available scFv phage antibody library. The VL gene repertoire, including DNA encoding the scFv peptide linker (G₄S)₃, is amplified from 300 ng of library plasmid DNA by using Vent DNA polymerase, the Gene3 primer (5′-GCAAGCCCAATAGGAACCCATGTACCG- SEQ ID No: 84), and an equimolar mixture of RHuJH primers. The amplified VH and VL genes are agarose gel-purified and spliced together with overlap extension PCR to create a scFv gene repertoire. To facilitate joining VH and VL gene repertoires with overlap extension PCR, the input DNA fragments have blunt ends. The proofreading DNA polymerase Vent is used to generate the VH and VL DNA fragments for scFv assembly. For all subsequent PCR steps of library construction, Tth DNA polymerase was found to be the optimal enzyme. The VH and VL gene repertoires are spliced together in 100-μl PCR reactions containing 100 ng of the VH and VL DNA fragments and Tth DNA polymerase. The reactions are cycled eight times (95° C. 2 min, 55° C., 1 min, and 72° C. 3 min) to join the fragments. Then the CITE3 and Gene3 primers are added, and the reaction is cycled 30 times (94° C. 1 min, 55° C. 1 min, and 72° C. 3 min) to amplify the assembled scFv genes. The scFv genes are digested with restriction enzymes NcoI and NotI, agarose gel-purified, and ligated into the plasmid pHEN-1 digested with NcoI and NotI. The ligated DNA is electroporated into E. coli TG1 cells

[0403] This method enables rapid production of panels (˜7×10⁹) of high-affinity (<1 nM) mAbs, which are desirable for therapeutics and diagnostics.

### Results

[0404] Single-chain Fv (scFv) Ab phage display libraries are generated from patients with ovarian cancer and screened to identify antibodies (Abs) recognizing TVM identified in the above Examples. To identify auto-Abs that recognize TVM in ovarian cancer patients, phage display libraries are generated from ovarian cancer tumor samples. Separate IgGκ and IgGλ phage libraries are constructed, using the phagemid vector pComb3X (Scripps Research Institute) from 4×10⁷ peripheral blood or ascites mononuclear cells. For library selection, IgGκ and IgGλ Ab phage display libraries are combined in equal amounts and panned by solid-phase selection on ELISA plates coated with generated peptides or proteins. Binding of individual phage clones isolated from each round of panning can be confirmed by ELISA, if desired. The VH and VL nucleic acid sequences are determined for positive clones to establish a cohort of unique mAbs specific to TVM. scFv monoclonal preparations unlinked to phages are produced using TOP10F′ non-suppressor E. coli. In other experiments, phage display libraries are panned on frozen tissue sections of normal ovaries and then on sections of ovarian cancer. Slides are then subjected to immuno-LCM, as described in previous Examples. With this approach, phages recognizing TVM are removed selectively from the tissue. RNA is isolated and used to infect additional phages. Serial panning between normal and tumor tissue leads to the selection to tumor vascular-specific phages, which are then used to develop Abs as above. With this alternative approach, additional TVM are identified

[0405] In other experiments, human scFv Ab libraries from normal donors are screened.

### Example 15

### Use of Transmembrane TVM for Tumor Localization In Vivo

[0406] The transmembrane TVM identified in the above Examples are used as targets for localizing ovarian or other solid tumors, as described for Adlican in Example 10. In other embodiments, radio-labeled antibodies are used for imaging. In another embodiment, positron-emission tomography is used.

### Example 16

### Use of Transmembrane TVM for Delivery of Anti-Tumor Agents In Vivo

[0407] In another embodiment, an antibody identified in one of the above Examples is used to target an anti-tumor agent to ovarian or other solid tumor in vivo. In some experiments, the anti-tumor agent is a radioactive antibody. In other experiments, the anti-tumor agent is an antibody conjugated to a nanosphere that contains an anti-tumor drug.

### Example 17

### Use of Secreted TVM for Serum Diagnostic Testing of Cancer In Vivo

[0408] Existing Abs and novel Abs or scFv identified in the above Examples, recognizing secretory TVM of the present invention, are tested for serum diagnostic applications. ELISA is utilized to test how well each TVM performs as a biomarker for ovarian cancer serum detection. In addition, TVM are tested as biomarkers for other solid tumors.

### Example 18

### Use of Transmembrane TVM for Vasculature-Redirected Lymphocyte Therapy

[0409] Chimeric immuno-receptors composed of high-affinity scFv recognizing TVM of the present invention (Example 14) fused to the cytoplasmic signaling modules of T cell receptor, CD28 and 4-1BB are created as described in Ledbetter J A et al (Enhanced transmembrane signaling activity of monoclonal antibody hetero-conjugates suggests molecular interactions between receptors on the T cell surface. Mol. Immunol. 1989 February; 26(2):137-45). The chimeric receptors are then utilized for vasculature-redirected lymphocyte therapy.

### Example 19

### Additional Studies with TNFRSF21 (DR6)

[0410] Expression of DR6 mRNA was determined in a variety of normal and tumor tissues by Affymetrix® array. Expression was relatively low in normal tissues (Table 9), while DR6 was heavily expressed in many tumor tissues, particularly bladder (Table 10).

TABLE 9
Affymetrix array scores of DR6 in normal tissues.

| | Affy |
|---|---|
| Tissue | score |
| Adipose tissue | 6 |
| Adrenal gland cortex | 4 |
| Bone marrow | 4 |
| Bronchus | 6 |
| Cerebellum | 5 |
| Cerebral cortex | 6 |
| Cerebrum | 6 |
| Cervix | 5 |
| Coronary artery | 5 |
| Colon cecum | 5 |
| Endometrium | 5 |
| Esophagus | 6 |
| Heart atrium | 5 |
| Heart ventricle | 5 |
| Kidney cortex | 6 |
| Kidney medulla | 6 |
| Liver | 4 |
| Lung | 5 |
| Lymph nodes | 6 |
| Mammary gland | 5 |
| Medulla | 6 |
| Midbrain | 6 |
| Myometrium | 5 |
| Nipple cross section | 5 |
| Oral mucosa | 6 |
| Ovary | 4 |
| Pharyngeal mucosa | 6 |
| Pituitary gland | 5 |
| Prostate gland | 5 |
| Salivary gland | 5 |
| Saphenous vein | 5 |
| Skeletal muscle | 4 |
| Spinal cord | 7 |
| Spleen | 4 |
| Stomach | 6 |
| Testes | 4 |
| Thyroid gland | 4 |
| Tongue | 6 |
| Tonsil | 6 |
| Trachea | 7 |
| Trigeminal ganglia | 6 |
| Urethra | 6 |
| Vagina | 5 |
| Vulva | 5 |

TABLE 10
Affymetrix array scores of DR6 in tumor tissues.

| | Affy |
|---|---|
| Tissue | score |
| Adrenal gland | 7 |
| Bladder | 8 |
| Brain | 6 |
| Breast | 6 |
| Cervix | 7 |
| Colon | 7 |
| Corpus uteri | 6 |
| Endometrium | 7 |
| Esophagus | 6 |
| Kidney | 7 |
| Liver | 7 |
| Lung | 7 |
| Omentum | 6 |
| Ovary | 7 |
| Pancreas | 7 |
| Prostate | 6 |
| Rectosigmoid | 7 |
| Small intestine | 6 |
| Stomach | 7 |
| Testis | 7 |
| Thyroid | 5 |
| Vulva | 6 |

[0411] Further, enhanced expression of DR6 in ovarian tumor relative to normal ovary tissue was confirmed by qPCR and IHC (FIG. 13A-B). In addition, increased serum levels of DR6 were found in serum of patients with ovarian tumors compared to healthy individuals (FIG. 14). Thus, DR6 is efficacious as a tumor marker (e.g. for ovarian tumors), both in situ and in tumors.

### Example 20

### Additional Studies with ADAM12

[0412] Expression of ADAM12 mRNA was determined in a variety of normal and tumor tissues by Affymetrix® array. Expression was relatively low in normal tissues (Table 11); while DR6 was significantly enriched in several tumor tissues (Table 12).

TABLE 11
Affymetrix array scores of ADAM12 in normal tissues.

| | Affy |
|---|---|
| Tissue | score |
| Adipose tissue | 3 |
| Adrenal gland cortex | 2 |
| Bone marrow | 2 |
| Bronchus | 2 |
| Cerebellum | 2 |
| Cerebral cortex | 2 |
| Cerebrum | 2 |
| Cervix | 2 |
| Colon cecum | 2 |
| Coronary artery | 2 |
| Endometrium | 5 |
| Esophagus | 2 |
| Heart atrium | 2 |
| Heart ventricle | 2 |
| Kidney cortex | 2 |
| Kidney medulla | 2 |
| Liver | 2 |
| Lung | 2 |
| Lymph nodes | 3 |
| Mammary gland | 3 |
| Medulla | 2 |
| Midbrain | 2 |
| Myometrium | 2 |
| Nipple cross section | 2 |
| Oral mucosa | 2 |
| Ovary | 4 |
| Pharyngeal mucosa | 2 |
| Pituitary gland | 2 |
| Prostate gland | 2 |
| Salivary gland | 2 |
| Saphenous vein | 2 |
| Skeletal muscle | 2 |
| Spinal cord | 2 |
| Spleen | 2 |
| Stomach | 2 |
| Testes | 2 |
| Thyroid gland | 2 |
| Tongue | 2 |
| Tonsil | 3 |
| Trachea | 2 |
| Trigeminal ganglia | 2 |
| Urethra | 2 |
| Vagina | 2 |
| Vulva | 3 |

TABLE 12
Affymetrix array scores of ADAM12 in tumor tissues.

| | Affy |
|---|---|
| Tissue | score |
| Adrenal gland | 5 |
| Bladder | 5 |
| Brain | 3 |
| Breast | 6 |
| Cervix | 5 |
| Colon | 5 |
| Corpus uteri | 6 |
| Endometrium | 5 |
| Esophagus | 3 |
| Kidney | 3 |
| Liver | 5 |
| Lung | 5 |
| Omentum | 5 |
| Ovary | 4 |
| Pancreas | 5 |
| Prostate | 3 |
| Rectosigmoid | 5 |
| Small intestine | 3 |
| Stomach | 3 |
| Testis | 3 |
| Thyroid | 3 |
| Vulva | 6 |

[0413] Further, enhanced expression of ADAM12 in ovarian tumor relative to normal tissues was confirmed by qPCR (FIG. 15). In addition, staining of ADAM12 was demonstrated in ovarian tumors (FIG. 16). The relevance of ADAM12 as a TVM was further confirmed by co-staining with CD31 and CD45 (FIGS. 17-18). Thus, ADAM12 is efficacious as a tumor marker (e.g. for ovarian tumors), further validating the results of the present invention.

### Example 21

### Additional Studies with CDCP1

[0414] Expression of CDCP1 mRNA was determined in a variety of normal and tumor tissues by Affymetrix® array. Expression was significantly enriched in several tumor tissues compared to most normal tissues (Tables 14 and 13, respectively).

TABLE 13
Affymetrix array scores of CDCP1 in normal tissues.

| | Affy |
|---|---|
| Tissue | score |
| Adipose tissue | 3 |
| Adrenal gland cortex | 3 |
| Bone marrow | 3 |
| Bronchus | 3 |
| Cerebellum | 3 |
| Cerebral cortex | 3 |
| Cerebrum | 3 |
| Cervix | 3 |
| Colon cecum | 3 |
| Coronary artery | 3 |
| Endometrium | 3 |
| Esophagus | 5 |
| Heart atrium | 3 |
| Heart ventricle | 3 |
| Kidney cortex | 3 |
| Kidney medulla | 3 |
| Liver | 3 |
| Lung | 3 |
| Lymph nodes | 3 |
| Mammary gland | 3 |
| Medulla | 3 |
| Midbrain | 3 |
| Myometrium | 3 |
| Nipple cross section | 4 |
| Oral mucosa | 5 |
| Ovary | 3 |
| Pharyngeal mucosa | 5 |
| Pituitary gland | 3 |
| Prostate gland | 4 |
| Salivary gland | 3 |
| Saphenous vein | 3 |
| Skeletal muscle | 3 |
| Spinal cord | 3 |
| Spleen | 3 |
| Stomach | 4 |
| Testes | 3 |
| Thyroid gland | 4 |
| Tongue | 4 |
| Tonsil | 4 |
| Trachea | 4 |
| Trigeminal ganglia | 3 |
| Urethra | 4 |
| Vagina | 4 |
| Vulva | 5 |

TABLE 14
Affymetrix array scores of CDCP1 in tumor tissues.

| | Affy |
|---|---|
| Tissue | score |
| Adrenal gland | 5 |
| Bladder | 5 |
| Brain | 4 |
| Breast | 5 |
| Cervix | 5 |
| Colon | 5 |
| Corpus uteri | 5 |
| Endometrium | 5 |
| Esophagus | 5 |
| Kidney | 4 |
| Liver | 5 |
| Lung | 5 |
| Omentum | 5 |
| Ovary | 5 |
| Pancreas | 5 |
| Prostate | 4 |
| Rectosigmoid | 5 |
| Small intestine | 5 |
| Stomach | 5 |
| Testis | 3 |
| Thyroid | 4 |
| Vulva | 5 |

[0415] Further, enhanced expression of the short isoform of CDCP1 in ovarian tumor relative to normal tissues was confirmed by qPCR (FIG. 19). In addition, staining of CDCP1 was demonstrated in ovarian tumors (FIG. 20). Thus, CDCP1 is efficacious as a tumor marker (e.g. for ovarian tumors), further validating the results of the present invention.

### Example 22

### Additional Studies with SLC11A1

[0416] Expression of SLC11A1 mRNA was determined in a variety of normal and tumor tissues by Affymetrix® array. Expression was significantly enriched in several tumor tissues compared to most normal tissues (Tables 16 and 15, respectively).

TABLE 15
Affymetrix array scores of SLC11A1 in normal tissues.

| | Affy |
|---|---|
| Tissue | score |
| Adipose tissue | 4 |
| Adrenal gland cortex | 4 |
| Bone marrow | 5 |
| Bronchus | 4 |
| Cerebellum | 4 |
| Cerebral cortex | 4 |
| Cerebrum | 4 |
| Cervix | 4 |
| Colon cecum | 4 |
| Coronary artery | 4 |
| Endometrium | 4 |
| Esophagus | 4 |
| Heart atrium | 4 |
| Heart ventricle | 4 |
| Kidney cortex | 4 |
| Kidney medulla | 4 |
| Liver | 4 |
| Lung | 5 |
| Lymph nodes | 4 |
| Mammary gland | 4 |
| Medulla | 4 |
| Midbrain | 4 |
| Myometrium | 4 |
| Nipple cross section | 4 |
| Oral mucosa | 4 |
| Ovary | 4 |
| Pharyngeal mucosa | 4 |
| Pituitary gland | 4 |
| Prostate gland | 4 |
| Salivary gland | 4 |
| Saphenous vein | 4 |
| Skeletal muscle | 5 |
| Spinal cord | 4 |
| Spleen | 4 |
| Stomach | 4 |
| Testes | 4 |
| Thyroid gland | 4 |
| Tongue | 4 |
| Tonsil | 4 |
| Trachea | 4 |
| Trigeminal ganglia | 4 |
| Urethra | 4 |
| Vagina | 4 |
| Vulva | 5 |

TABLE 16
Affymetrix array scores of SLC11A1 in tumor tissues.

| | Affy |
|---|---|
| Tissue | score |
| Adrenal gland | 4 |
| Bladder | 5 |
| Brain | 5 |
| Breast | 5 |
| Cervix | 5 |
| Colon | 5 |
| Corpus uteri | 5 |
| Endometrium | 5 |
| Esophagus | 4 |
| Kidney | 5 |
| Liver | 5 |
| Lung | 5 |
| Omentum | 5 |
| Ovary | 5 |
| Pancreas | 5 |
| Prostate | 5 |
| Rectosigmoid | 5 |
| Small intestine | 5 |
| Stomach | 5 |
| Testis | 5 |
| Thyroid | 5 |
| Vulva | 5 |

[0417] Further, enhanced expression of SLC11A1 in ovarian tumor relative to normal tissues was confirmed by qPCR (FIG. 21). In addition, staining of SLC11A1 was demonstrated in ovarian tumors (FIG. 22). The relevance of SLC11A1 as a TVM was further confirmed by co-staining with CD31 and CD45 (FIGS. 23-24). Thus, SLC11A1 is efficacious as a tumor marker (e.g. for ovarian tumors).

### Example 23

### Additional Studies with Blame

[0418] Expression of BLAME mRNA was determined in a variety of normal and tumor tissues by Affymetrix® array. Expression was significantly enriched in most tumor tissues compared to most normal tissues (Tables 18 and 17, respectively).

TABLE 17
Affymetrix array scores of BLAME in normal tissues.

| | Affy |
|---|---|
| Tissue | score |
| Adipose tissue | 3 |
| Adrenal gland cortex | 2 |
| Bone marrow | 3 |
| Bronchus | 3 |
| Cerebellum | 2 |
| Cerebral cortex | 2 |
| Cerebrum | 2 |
| Cervix | 2 |
| Colon cecum | 3 |
| Coronary artery | 3 |
| Endometrium | 2 |
| Esophagus | 2 |
| Heart atrium | 2 |
| Heart ventricle | 2 |
| Kidney cortex | 2 |
| Kidney medulla | 2 |
| Liver | 3 |
| Lung | 4 |
| Lymph nodes | 5 |
| Mammary gland | 3 |
| Medulla | 2 |
| Midbrain | 2 |
| Myometrium | 2 |
| Nipple cross section | 3 |
| Oral mucosa | 3 |
| Ovary | 2 |
| Pharyngeal mucosa | 3 |
| Pituitary gland | 2 |
| Prostate gland | 2 |
| Salivary gland | 2 |
| Saphenous vein | 3 |
| Skeletal muscle | 2 |
| Spinal cord | 2 |
| Spleen | 3 |
| Stomach | 3 |
| Testes | 2 |
| Thyroid gland | 3 |
| Tongue | 3 |
| Tonsil | 4 |
| Trachea | 3 |
| Trigeminal ganglia | 3 |
| Urethra | 3 |
| Vagina | 2 |
| Vulva | 2 |

TABLE 18
Affymetrix array scores of BLAME in tumor tissues.

| | Affy |
|---|---|
| Tissue | score |
| Adrenal gland | 6 |
| Bladder | 5 |
| Brain | 3 |
| Breast | 5 |
| Cervix | 4 |
| Colon | 5 |
| Corpus uteri | 5 |
| Endometrium | 4 |
| Esophagus | 4 |
| Kidney | 5 |
| Liver | 5 |
| Lung | 5 |
| Omentum | 5 |
| Ovary | 4 |
| Pancreas | 5 |
| Prostate | 4 |
| Rectosigmoid | 5 |
| Small intestine | 5 |
| Stomach | 4 |
| Testis | 7 |
| Thyroid | 4 |
| Vulva | 5 |

[0419] Further, enhanced expression of BLAME in ovarian tumor relative to normal tissues was confirmed by qPCR (FIG. 25). In addition, staining of BLAME was demonstrated in ovarian tumors (FIG. 26). The relevance of BLAME as a TVM was further confirmed by co-staining with CD31 and CD45 (FIG. 27). Thus, BLAME is efficacious as a tumor marker (e.g. for ovarian, adrenal, and testis tumors).

### Example 24

### Additional Studies with ESM1

[0420] Expression of ESM1 mRNA was determined in a variety of normal and tumor tissues by Affymetrix® array. Expression was significantly enriched in tumor tissues compared to normal tissues (Tables 20 and 19, respectively).

TABLE 19
Affymetrix array scores of ESM1 in normal tissues.

| | Affy |
|---|---|
| Tissue | score |
| Adipose tissue | 2 |
| Adrenal gland cortex | 2 |
| Bone marrow | 2 |
| Bronchus | 2 |
| Cerebellum | 2 |
| Cerebral cortex | 2 |
| Cerebrum | 2 |
| Cervix | 2 |
| Colon cecum | 2 |
| Coronary artery | 2 |
| Endometrium | 3 |
| Esophagus | 2 |
| Heart atrium | 2 |
| Heart ventricle | 2 |
| Kidney cortex | 3 |
| Kidney medulla | 2 |
| Liver | 2 |
| Lung | 3 |
| Lymph nodes | 2 |
| Mammary gland | 2 |
| Medulla | 2 |
| Midbrain | 2 |
| Myometrium | 2 |
| Nipple cross section | 2 |
| Oral mucosa | 2 |
| Ovary | 2 |
| Pharyngeal mucosa | 2 |
| Pituitary gland | 2 |
| Prostate gland | 2 |
| Salivary gland | 2 |
| Saphenous vein | 2 |
| Skeletal muscle | 2 |
| Spinal cord | 2 |
| Spleen | 2 |
| Stomach | 2 |
| Testes | 2 |
| Thyroid gland | 2 |
| Tongue | 2 |
| Tonsil | 2 |
| Trachea | 2 |
| Trigeminal ganglia | 2 |
| Urethra | 2 |
| Vagina | 2 |
| Vulva | 2 |

TABLE 20
Affymetrix array scores of ESM1 in tumor tissues.

| | Affy |
|---|---|
| Tissue | score |
| Adrenal gland | 6 |
| Bladder | 3 |
| Brain | 3 |
| Breast | 3 |
| Cervix | 3 |
| Colon | 3 |
| Corpus uteri | 4 |
| Endometrium | 3 |
| Esophagus | 3 |
| Kidney | 6 |
| Liver | 3 |
| Lung | 4 |
| Omentum | 4 |
| Ovary | 4 |
| Pancreas | 3 |
| Prostate | 3 |
| Rectosigmoid | 3 |
| Small intestine | 3 |
| Stomach | 3 |
| Testis | 3 |
| Thyroid | 3 |
| Vulva | 3 |

[0421] Thus, ESM1 is efficacious as a tumor marker (e.g. for ovarian, adrenal, and kidney tumors).

### Example 25

### Additional Expression Studies

[0422] mRNA expression levels of additional markers were determined in a variety of normal and tumor tissues by Affymetrix® array. Results are depicted in Tables 21-28.

TABLE 21
Affymetrix array scores of additional markers in normal tissues.

| | | SCGB- | | | | | |
|---|---|---|---|---|---|---|---|
| Tissue | c6orf55 | 2A1 | DSG2 | EPSTI1 | SEC-23B | MS4A6A | LOC51136 |
| Adipose | 4 | 2 | 4 | 4 | 3 | 5 | 3 |
| tissue | | | | | | | |
| Adrenal | 4 | 2 | 2 | 4 | 2 | 5 | 3 |
| gland | | | | | | | |
| cortex | | | | | | | |
| Bone | 4 | 2 | 2 | 4 | 2 | 5 | 3 |
| marrow | | | | | | | |
| Bronchus | 4 | 3 | 4 | 4 | 5 | 4 | 2 |
| Cerebellum | 4 | 2 | 2 | 3 | 2 | 4 | 2 |
| Cerebral | 4 | 2 | 2 | 3 | 2 | 4 | 2 |
| cortex | | | | | | | |
| Cerebrum | 4 | 2 | 2 | 3 | 2 | 4 | 2 |
| Cervix | 4 | 4 | 3 | 4 | 2 | 4 | 3 |
| Colon | 4 | 2 | 4 | 4 | 2 | 4 | 2 |
| cecum | | | | | | | |
| Coronary | 4 | 2 | 3 | 4 | 4 | 5 | 2 |
| artery | | | | | | | |
| Endo- | 4 | 7 | 4 | 4 | 4 | 4 | 3 |
| metrium | | | | | | | |
| Esophagus | 5 | 2 | 3 | 3 | 2 | 4 | 2 |
| Heart | 4 | 2 | 5 | 4 | 2 | 5 | 3 |
| atrium | | | | | | | |
| Heart | 4 | 2 | 4 | 4 | 2 | 4 | 2 |
| ventricle | | | | | | | |
| Kidney | 4 | 2 | 5 | 4 | 2 | 4 | 2 |
| cortex | | | | | | | |
| Kidney | 4 | 2 | 5 | 4 | 2 | 4 | 2 |
| medulla | | | | | | | |
| Liver | 4 | 2 | 3 | 4 | 2 | 6 | 3 |
| Lung | 4 | 2 | 3 | 5 | 2 | 5 | 3 |
| Lymph | 4 | 2 | 2 | 5 | 2 | 6 | 3 |
| nodes | | | | | | | |
| Mammary | 4 | 4 | 5 | 4 | 3 | 5 | 3 |
| gland | | | | | | | |
| Medulla | 4 | 2 | 2 | 4 | 2 | 4 | 2 |
| Midbrain | 4 | 2 | 2 | 4 | 2 | 4 | 2 |
| Myo- | 4 | 2 | 2 | 3 | 2 | 4 | 2 |
| metrium | | | | | | | |
| Nipple | 4 | 3 | 3 | 3 | 2 | 4 | 2 |
| cross | | | | | | | |
| section | | | | | | | |
| Oral | 5 | 2 | 3 | 4 | 2 | 5 | 3 |
| mucosa | | | | | | | |
| Ovary | 4 | 2 | 3 | 4 | 2 | 4 | 3 |
| Pharyngeal | 5 | 3 | 3 | 3 | 3 | 5 | 3 |
| mucosa | | | | | | | |
| Pituitary | 4 | 3 | 2 | 4 | 2 | 4 | 2 |
| gland | | | | | | | |
| Prostate | 4 | 4 | 5 | 4 | 2 | 4 | 3 |
| gland | | | | | | | |
| Salivary | 4 | 4 | 5 | 4 | 3 | 4 | 3 |
| gland | | | | | | | |
| Saphenous | 4 | 2 | 2 | 4 | 3 | 5 | 2 |
| vein | | | | | | | |
| Skeletal | 5 | 2 | 2 | 4 | 3 | 4 | 2 |
| muscle | | | | | | | |
| Spinal cord | 4 | 2 | 2 | 4 | 2 | 5 | 2 |
| Spleen | 5 | 2 | 2 | 5 | 2 | 5 | 3 |
| Stomach | 4 | 4 | 4 | 4 | 2 | 5 | 3 |
| Testes | 4 | 2 | 2 | 4 | 3 | 4 | 6 |
| Thyroid | 4 | 3 | 5 | 4 | 2 | 5 | 3 |
| gland | | | | | | | |
| Tongue | 5 | 4 | 3 | 4 | 3 | 5 | 3 |
| Tonsil | 4 | 2 | 2 | 5 | 2 | 5 | 3 |
| Trachea | 4 | 4 | 4 | 4 | 6 | 5 | 3 |
| Trigeminal | 4 | 2 | 2 | 4 | 2 | 5 | 2 |
| ganglia | | | | | | | |
| Urethra | 5 | 3 | 4 | 4 | 2 | 5 | 3 |
| Vagina | 5 | 2 | 3 | 4 | 2 | 5 | 3 |
| Vulva | 5 | 2 | 3 | 4 | 2 | 4 | 3 |

TABLE 22
Affymetrix array scores of additional markers in normal tissues.

| Tissue | EGFL6 | KCNE3 | KCNE4 | c14orf-100 | C2orf6 | KCNK5 | C14orf28 |
|---|---|---|---|---|---|---|---|
| Adipose | 4 | 4 | 3 | 5 | 2 | 3 | 2 |
| tissue | | | | | | | |
| Adrenal | 2 | 4 | 2 | 5 | 2 | 3 | 2 |
| gland | | | | | | | |
| cortex | | | | | | | |
| Bone | 3 | 5 | 2 | 5 | 3 | 3 | 2 |
| marrow | | | | | | | |
| Bronchus | 3 | 5 | 2 | 5 | 2 | 3 | 2 |
| Cerebellum | 2 | 3 | 2 | 5 | 2 | 3 | 2 |
| Cerebral | 3 | 3 | 2 | 5 | 2 | 3 | 2 |
| cortex | | | | | | | |
| Cerebrum | 3 | 4 | 2 | 5 | 2 | 3 | 2 |
| Cervix | 3 | 5 | 3 | 5 | 3 | 3 | 2 |
| Colon | 2 | 5 | 2 | 4 | 2 | 3 | 2 |
| cecum | | | | | | | |
| Coronary | 2 | 4 | 3 | 4 | 2 | 3 | 2 |
| artery | | | | | | | |
| Endo- | 4 | 5 | 3 | 5 | 3 | 3 | 2 |
| metrium | | | | | | | |
| Esophagus | 3 | 4 | 2 | 5 | 3 | 3 | 2 |
| Heart | 2 | 4 | 2 | 5 | 2 | 3 | 2 |
| atrium | | | | | | | |
| Heart | 3 | 4 | 2 | 4 | 2 | 3 | 2 |
| ventricle | | | | | | | |
| Kidney | 2 | 5 | 2 | 5 | 3 | 5 | 2 |
| cortex | | | | | | | |
| Kidney | 3 | 5 | 2 | 5 | 2 | 4 | 2 |
| medulla | | | | | | | |
| Liver | 3 | 4 | 2 | 5 | 2 | 4 | 3 |
| Lung | 5 | 5 | 2 | 5 | 2 | 3 | 2 |
| Lymph | 3 | 4 | 3 | 5 | 3 | 3 | 2 |
| nodes | | | | | | | |
| Mammary | 6 | 4 | 2 | 5 | 2 | 3 | 2 |
| gland | | | | | | | |
| Medulla | 3 | 4 | 2 | 5 | 2 | 3 | 2 |
| Midbrain | 3 | 4 | 2 | 5 | 2 | 3 | 2 |
| Myo- | 3 | 4 | 4 | 5 | 2 | 3 | 3 |
| metrium | | | | | | | |
| Nipple | 3 | 4 | 2 | 5 | 2 | 3 | 2 |
| cross | | | | | | | |
| section | | | | | | | |
| Oral | 3 | 3 | 2 | 5 | 3 | 3 | 2 |
| mucosa | | | | | | | |
| Ovary | 3 | 5 | 3 | 5 | 3 | 3 | 3 |
| Pharyngeal | 3 | 4 | 2 | 5 | 3 | 3 | 2 |
| mucosa | | | | | | | |
| Pituitary | 3 | 4 | 2 | 5 | 2 | 3 | 2 |
| gland | | | | | | | |
| Prostate | 3 | 4 | 2 | 6 | 3 | 3 | 3 |
| gland | | | | | | | |
| Salivary | 3 | 4 | 2 | 5 | 2 | 3 | 3 |
| gland | | | | | | | |
| Saphenous | 3 | 4 | 5 | 5 | 2 | 3 | 4 |
| vein | | | | | | | |
| Skeletal | 3 | 3 | 2 | 5 | 2 | 3 | 2 |
| muscle | | | | | | | |
| Spinal cord | 3 | 4 | 2 | 6 | 2 | 3 | 2 |
| Spleen | 2 | 5 | 3 | 5 | 3 | 3 | 2 |
| Stomach | 3 | 6 | 3 | 5 | 3 | 3 | 3 |
| Testes | 2 | 3 | 2 | 5 | 2 | 3 | 4 |
| Thyroid | 2 | 5 | 2 | 5 | 2 | 3 | 3 |
| gland | | | | | | | |
| Tongue | 3 | 4 | 2 | 5 | 3 | 3 | 2 |
| Tonsil | 3 | 4 | 2 | 5 | 3 | 3 | 2 |
| Trachea | 3 | 5 | 2 | 5 | 2 | 3 | 2 |
| Trigeminal | 4 | 4 | 3 | 6 | 2 | 3 | 2 |
| ganglia | | | | | | | |
| Urethra | 3 | 5 | 3 | 6 | 3 | 3 | 3 |
| Vagina | 3 | 5 | 2 | 5 | 3 | 3 | 2 |
| Vulva | 3 | 4 | 2 | 5 | 3 | 3 | 2 |

TABLE 23
Affymetrix array scores of additional markers in normal tissues.

| Tissue | PCDHB2 | FZD10 | ST14 | OLFML2B | GPR105 | SDC1 | FLJ46072 |
|---|---|---|---|---|---|---|---|
| Adipose | 4 | 3 | 3 | 5 | 4 | 4 | 4 |
| tissue | | | | | | | |
| Adrenal | 5 | 2 | 2 | 4 | 2 | 3 | 4 |
| gland | | | | | | | |
| cortex | | | | | | | |
| Bone | 4 | 2 | 2 | 3 | 2 | 3 | 3 |
| marrow | | | | | | | |
| Bronchus | 4 | 3 | 4 | 4 | 2 | 4 | 5 |
| Cerebellum | 5 | 3 | 2 | 3 | 2 | 3 | 3 |
| Cerebral | 6 | 2 | 2 | 3 | 2 | 3 | 4 |
| cortex | | | | | | | |
| Cerebrum | 6 | 2 | 2 | 3 | 2 | 3 | 4 |
| Cervix | 5 | 4 | 3 | 5 | 2 | 5 | 4 |
| Colon | 5 | 3 | 4 | 4 | 5 | 4 | 4 |
| cecum | | | | | | | |
| Coronary | 5 | 2 | 2 | 5 | 3 | 2 | 3 |
| artery | | | | | | | |
| Endo- | 4 | 4 | 3 | 6 | 5 | 3 | 4 |
| metrium | | | | | | | |
| Esophagus | 4 | 5 | 2 | 3 | 3 | 7 | 6 |
| Heart | 4 | 2 | 2 | 4 | 3 | 2 | 4 |
| atrium | | | | | | | |
| Heart | 5 | 2 | 2 | 3 | 3 | 3 | 3 |
| ventricle | | | | | | | |
| Kidney | 5 | 2 | 3 | 3 | 2 | 6 | 5 |
| cortex | | | | | | | |
| Kidney | 4 | 2 | 4 | 3 | 2 | 6 | 5 |
| medulla | | | | | | | |
| Liver | 4 | 2 | 3 | 3 | 2 | 7 | 5 |
| Lung | 6 | | 3 | 5 | 4 | 4 | 4 |
| Lymph | 5 | 3 | 2 | 4 | 3 | 3 | 3 |
| nodes | | | | | | | |
| Mammary | 4 | 3 | 3 | 5 | 3 | 4 | 5 |
| gland | | | | | | | |
| Medulla | 6 | 2 | 2 | 3 | 2 | 2 | 3 |
| Midbrain | 6 | 2 | 2 | 4 | 3 | 3 | 3 |
| Myo- | 5 | 2 | 2 | 4 | 2 | 3 | 3 |
| metrium | | | | | | | |
| Nipple | 4 | 4 | 4 | 4 | 4 | 6 | 6 |
| cross | | | | | | | |
| section | | | | | | | |
| Oral | 4 | 5 | 6 | 4 | 4 | 7 | 7 |
| mucosa | | | | | | | |
| Ovary | 4 | 2 | 2 | 4 | 2 | 3 | 3 |
| Pharyngeal | 4 | 6 | 4 | 4 | 4 | 6 | 6 |
| mucosa | | | | | | | |
| Pituitary | 5 | 3 | 3 | 3 | 4 | 3 | 4 |
| gland | | | | | | | |
| Prostate | 4 | 2 | 4 | 3 | 2 | 5 | 5 |
| gland | | | | | | | |
| Salivary | 4 | 3 | 4 | 4 | 2 | 4 | 5 |
| gland | | | | | | | |
| Saphenous | 5 | 3 | 3 | 6 | 4 | 3 | 3 |
| vein | | | | | | | |
| Skeletal | 4 | 3 | 3 | 4 | 4 | 3 | 3 |
| muscle | | | | | | | |
| Spinal cord | 6 | 3 | 2 | 3 | 2 | 2 | 3 |
| Spleen | 7 | 2 | 3 | 3 | 3 | 3 | 3 |
| Stomach | 5 | 3 | 4 | 4 | 5 | 4 | 5 |
| Testes | 6 | 2 | 2 | 5 | 2 | 4 | 4 |
| Thyroid | 4 | 3 | 4 | 5 | 3 | 4 | 6 |
| gland | | | | | | | |
| Tongue | 4 | 2 | 4 | 4 | 3 | 5 | 5 |
| Tonsil | 4 | 3 | 4 | 4 | 4 | 5 | 5 |
| Trachea | 4 | 3 | 5 | 4 | 3 | 5 | 5 |
| Trigeminal | 5 | 3 | 2 | 5 | 4 | 3 | 4 |
| ganglia | | | | | | | |
| Urethra | 5 | 2 | 4 | 6 | 5 | 6 | 5 |
| Vagina | 4 | 2 | 4 | 4 | 2 | 6 | 5 |
| Vulva | 4 | 5 | 4 | 4 | 3 | 6 | 6 |

TABLE 24
Affymetrix array scores of additional markers in normal tissues.

| Tissue | IVNS1ABP | SPP1 | DKFZp762E1312 | WFDC2 | KIAA1892 | C6orf69 | KIBRA |
|---|---|---|---|---|---|---|---|
| Adipose | 4 | 5 | 3 | 4 | 5 | 6 | 4 |
| tissue | | | | | | | |
| Adrenal | 4 | 3 | 3 | 3 | 7 | 6 | 4 |
| gland | | | | | | | |
| cortex | | | | | | | |
| Bone | 6 | 5 | 5 | 4 | 8 | 5 | 4 |
| marrow | | | | | | | |
| Bronchus | 5 | 5 | 3 | 7 | 5 | 5 | 5 |
| Cerebellum | 4 | 6 | 3 | 4 | 5 | 5 | 5 |
| Cerebral | 5 | 8 | 3 | 4 | 5 | 5 | 5 |
| cortex | | | | | | | |
| Cerebrum | 5 | 8 | 3 | 4 | 5 | 5 | 6 |
| Cervix | 5 | 6 | 3 | 5 | 6 | 6 | 4 |
| Colon | 4 | 5 | 4 | 4 | 5 | 5 | 4 |
| cecum | | | | | | | |
| Coronary | 5 | 5 | 3 | 4 | 5 | 5 | 4 |
| artery | | | | | | | |
| Endo- | 5 | 5 | 4 | 6 | 6 | 5 | 5 |
| metrium | | | | | | | |
| Esophagus | 4 | 3 | 4 | 4 | 6 | 6 | 5 |
| Heart | 4 | 4 | 3 | 3 | 5 | 5 | 4 |
| atrium | | | | | | | |
| Heart | 5 | 3 | 3 | 4 | 5 | 5 | 4 |
| ventricle | | | | | | | |
| Kidney | 6 | 9 | 3 | 5 | 5 | 5 | 6 |
| cortex | | | | | | | |
| Kidney | 6 | 9 | 3 | 5 | 6 | 5 | 6 |
| medulla | | | | | | | |
| Liver | 4 | 5 | 3 | 3 | 5 | 6 | 5 |
| Lung | 5 | 5 | 3 | 5 | 5 | 6 | 5 |
| Lymph | 5 | 4 | 3 | 4 | 6 | 6 | 4 |
| nodes | | | | | | | |
| Mammary | 5 | 6 | 4 | 5 | 5 | 6 | 5 |
| gland | | | | | | | |
| Medulla | 5 | 9 | 3 | 3 | 5 | 5 | 6 |
| Midbrain | 5 | 9 | 3 | 4 | 5 | 5 | 5 |
| Myo- | 4 | 4 | 3 | 4 | 5 | 5 | 3 |
| metrium | | | | | | | |
| Nipple | 4 | 3 | 3 | 5 | 5 | 6 | 5 |
| cross | | | | | | | |
| section | | | | | | | |
| Oral | 4 | 3 | 4 | 4 | 5 | 6 | 6 |
| mucosa | | | | | | | |
| Ovary | 5 | 4 | 4 | 4 | 5 | 6 | 4 |
| Pharyngeal | 5 | 3 | 4 | 5 | 6 | 6 | 5 |
| mucosa | | | | | | | |
| Pituitary | 5 | 4 | 4 | 6 | 5 | 5 | 5 |
| gland | | | | | | | |
| Prostate | 5 | 5 | 3 | 5 | 5 | 5 | 6 |
| gland | | | | | | | |
| Salivary | 5 | 4 | 3 | 7 | 5 | 5 | 4 |
| gland | | | | | | | |
| Saphenous | 4 | 3 | 3 | 5 | 5 | 6 | 4 |
| vein | | | | | | | |
| Skeletal | 4 | 3 | 4 | 4 | 5 | 5 | 4 |
| muscle | | | | | | | |
| Spinal cord | 5 | 9 | 3 | 4 | 5 | 5 | 6 |
| Spleen | 5 | 3 | 3 | 3 | 5 | 6 | 4 |
| Stomach | 5 | 4 | 4 | 4 | 5 | 5 | 5 |
| Testes | 5 | 3 | 5 | 4 | 6 | 4 | 4 |
| Thyroid | 5 | 4 | 3 | 6 | 5 | 5 | 6 |
| gland | | | | | | | |
| Tongue | 5 | 4 | 4 | 6 | 5 | 5 | 5 |
| Tonsil | 5 | 3 | 4 | 4 | 5 | 5 | 4 |
| Trachea | 5 | 5 | 3 | 8 | 5 | 5 | 5 |
| Trigeminal | 5 | 7 | 3 | 6 | 5 | 6 | 4 |
| ganglia | | | | | | | |
| Urethra | 5 | 4 | 3 | 4 | 5 | 6 | 4 |
| Vagina | 5 | 4 | 4 | 4 | 5 | 5 | 4 |
| Vulva | 5 | 3 | 4 | 4 | 5 | 5 | 5 |

TABLE 25
Affymetrix array scores of additional markers in tumor tissues.

| | | SCGB- | | | | | |
|---|---|---|---|---|---|---|---|
| Tissue | c6orf55 | 2A1 | DSG2 | EPSTI1 | SEC-23B | MS4A6A | LOC51136 |
| Adrenal | 6 | 3 | 7 | 7 | 6 | 8 | 5 |
| gland | | | | | | | |
| Bladder | 5 | 3 | 7 | 5 | 5 | 5 | 4 |
| Brain | 5 | 6 | 5 | 5 | 5 | 5 | 3 |
| Breast | 6 | 6 | 7 | 5 | 6 | 6 | 5 |
| Cervix | 5 | 5 | 7 | 5 | 6 | 5 | 4 |
| Colon | 6 | 5 | 8 | 6 | 6 | 6 | 4 |
| Corpus | 6 | 8 | 7 | 5 | 6 | 6 | 4 |
| uteri | | | | | | | |
| Endo- | 5 | 9 | 7 | 5 | 6 | 5 | 4 |
| metrium | | | | | | | |
| Esophagus | 5 | 2 | 5 | 5 | 5 | 5 | 3 |
| Kidney | 5 | 3 | 7 | 5 | 6 | 6 | 4 |
| Liver | 5 | 3 | 7 | 6 | 6 | 6 | 5 |
| Lung | 5 | 5 | 7 | 6 | 6 | 6 | 4 |
| Omentum | 6 | 8 | 7 | 6 | 6 | 6 | 4 |
| Ovary | 6 | 8 | 7 | 6 | 6 | 6 | 4 |
| Pancreas | 5 | 6 | 6 | 6 | 6 | 6 | 3 |
| Prostate | 5 | 4 | 6 | 4 | 6 | 5 | 4 |
| Recto- | 5 | 4 | 8 | 6 | 6 | 6 | 4 |
| sigmoid | | | | | | | |
| Small | 5 | 6 | 6 | 5 | 6 | 5 | 4 |
| intestine | | | | | | | |
| Stomach | 5 | 4 | 7 | 5 | 6 | 5 | 4 |
| Testis | 5 | 2 | 4 | 7 | 6 | 8 | 4 |
| Thyroid | 5 | 4 | 7 | 5 | 5 | 5 | 4 |
| Vulva | 6 | 2 | 6 | 5 | 6 | 5 | 4 |

TABLE 26
Affymetrix array scores of additional markers in tumor tissues.

| Tissue | EGFL6 | KCNE3 | KCNE4 | C14orf-100 | C2orf6 | KCNK5 | C14orf28 |
|---|---|---|---|---|---|---|---|
| Adrenal | 3 | 7 | 5 | 7 | 5 | 5 | 3 |
| gland | | | | | | | |
| Bladder | 5 | 4 | 3 | 5 | 4 | 3 | 3 |
| Brain | 5 | 5 | 3 | 5 | 3 | 3 | 2 |
| Breast | 5 | 5 | 5 | 6 | 4 | 4 | 3 |
| Cervix | 5 | 5 | 4 | 5 | 4 | 3 | 3 |
| Colon | 4 | 6 | 3 | 6 | 4 | 4 | 3 |
| Corpus uteri | 7 | 5 | 4 | 6 | 4 | 3 | 3 |
| Endo- | 5 | 6 | 4 | 6 | 4 | 4 | 3 |
| metrium | | | | | | | |
| Esophagus | 3 | 6 | 3 | 5 | 3 | 3 | 2 |
| Kidney | 3 | 7 | 4 | 6 | 4 | 4 | 3 |
| Liver | 4 | 6 | 4 | 6 | 4 | 4 | 3 |
| Lung | 6 | 6 | 4 | 6 | 4 | 4 | 3 |
| Omentum | 6 | 5 | 4 | 6 | 4 | 4 | 3 |
| Ovary | 5 | 6 | 4 | 6 | 5 | 4 | 3 |
| Pancreas | 4 | 5 | 5 | 6 | 4 | 4 | 3 |
| Prostate | 3 | 4 | 3 | 6 | 4 | 3 | 3 |
| Recto- | 5 | 7 | 4 | 6 | 4 | 5 | 3 |
| sigmoid | | | | | | | |
| Small | 5 | 5 | 3 | 6 | 4 | 4 | 3 |
| intestine | | | | | | | |
| Stomach | 3 | 7 | 4 | 6 | 4 | 4 | 3 |
| Testis | 3 | 5 | 3 | 6 | 5 | 4 | 3 |
| Thyroid | 5 | 5 | 4 | 6 | 4 | 4 | 3 |
| Vulva | 5 | 5 | 3 | 5 | 4 | 3 | 3 |

TABLE 27
Affymetrix array scores of additional markers in tumor tissues.

| Tissue | PCDHB2 | FZD10 | ST14 | OLFML2B | GPR105 | SDC1 | FLJ46072 |
|---|---|---|---|---|---|---|---|
| Adrenal | 6 | 2 | 6 | 7 | 4 | 7 | 6 |
| gland | | | | | | | |
| Bladder | 5 | 3 | 5 | 5 | 3 | 7 | 6 |
| Brain | 6 | 3 | 4 | 4 | 2 | 5 | 5 |
| Breast | 5 | 3 | 5 | 6 | 4 | 7 | 6 |
| Cervix | 5 | 5 | 5 | 5 | 3 | 7 | 6 |
| Colon | 5 | 4 | 6 | 5 | 4 | 6 | 6 |
| Corpus | 5 | 6 | 5 | 7 | 3 | 5 | 5 |
| uteri | | | | | | | |
| Endo- | 5 | 5 | 5 | 5 | 3 | 6 | 6 |
| metrium | | | | | | | |
| Esophagus | 5 | 2 | 5 | 5 | 3 | 6 | 5 |
| Kidney | 6 | 2 | 4 | 5 | 4 | 6 | 5 |
| Liver | 5 | 3 | 6 | 6 | 3 | 7 | 6 |
| Lung | 6 | 4 | 5 | 6 | 4 | 7 | 6 |
| Omentum | 5 | 5 | 5 | 6 | 3 | 6 | 6 |
| Ovary | 5 | 5 | 5 | 5 | 3 | 6 | 6 |
| Pancreas | 6 | 2 | 5 | 6 | 4 | 6 | 5 |
| Prostate | 4 | 3 | 5 | 4 | 3 | 5 | 5 |
| Recto- | 5 | 4 | 6 | 6 | 5 | 6 | 6 |
| sigmoid | | | | | | | |
| Small | 5 | 4 | 5 | 4 | 3 | 5 | 5 |
| intestine | | | | | | | |
| Stomach | 6 | 3 | 5 | 5 | 6 | 6 | 6 |
| Testis | 4 | 2 | 3 | 6 | 6 | 4 | 4 |
| Thyroid | 5 | 3 | 4 | 4 | 4 | 6 | 5 |
| Vulva | 5 | 4 | 5 | 6 | 3 | 8 | 6 |

TABLE 28
Affymetrix array scores of additional markers in tumor tissues.

| Tissue | IVNS1ABP | SPP1 | DKFZp762E1312 | WFDC2 | KIAA1892 | C6orf69 | KIBRA |
|---|---|---|---|---|---|---|---|
| Adrenal | 7 | 9 | 6 | 6 | 6 | 7 | 5 |
| gland | | | | | | | |
| Bladder | 5 | 7 | 4 | 6 | 5 | 6 | 4 |
| Brain | 5 | 6 | 3 | 6 | 5 | 6 | 5 |
| Breast | 5 | 8 | 4 | 6 | 6 | 6 | 5 |
| Cervix | 6 | 7 | 4 | 6 | 5 | 6 | 4 |
| Colon | 6 | 7 | 4 | 6 | 6 | 6 | 5 |
| Corpus | 6 | 7 | 5 | 7 | 6 | 6 | 5 |
| uteri | | | | | | | |
| Endo- | 6 | 8 | 4 | 8 | 6 | 6 | 5 |
| metrium | | | | | | | |
| Esophagus | 5 | 6 | 4 | 5 | 4 | 5 | 4 |
| Kidney | 7 | 9 | 3 | 6 | 5 | 6 | 6 |
| Liver | 6 | 9 | 4 | 6 | 6 | 6 | 5 |
| Lung | 6 | 8 | 4 | 7 | 6 | 6 | 5 |
| Omentum | 6 | 8 | 5 | 7 | 6 | 6 | 5 |
| Ovary | 6 | 8 | 5 | 8 | 6 | 6 | 5 |
| Pancreas | 5 | 7 | 3 | 5 | 5 | 6 | 5 |
| Prostate | 5 | 5 | 3 | 5 | 5 | 6 | 6 |
| Recto- | 6 | 8 | 4 | 6 | 6 | 6 | 5 |
| sigmoid | | | | | | | |
| Small | 5 | 7 | 4 | 5 | 5 | 6 | 4 |
| intestine | | | | | | | |
| Stomach | 5 | 7 | 4 | 4 | 5 | 6 | 5 |
| Testis | 7 | 6 | 4 | 5 | 7 | 6 | 4 |
| Thyroid | 6 | 7 | 3 | 6 | 5 | 5 | 5 |
| Vulva | 6 | 7 | 4 | 4 | 6 | 6 | 4 |

[0423] Thus, TVM of the present invention are enriched in a wide variety of tumor cells. These findings further validate the TVM identified in the present invention, and demonstrate that the TVM are relevant in general to tumor cells. Further, the results show that diagnostic, localization, and therapeutic methods based on TVM of the present invention are not limited to ovarian tumors, but rather are applicable to all solid tumors.

The application's sequence listing, which the Patent Office published only in electronic form, follows.

SEQUENCE LISTING (201 sequences)

SEQ ID NO: 1 - DNA, 5062 bp, Homo sapiens
cactaacgctcttcctagtccccgggccaactcggacagtttgctcatttattgcaacggtcaaggctggcttgtgccagaacggcgcgcgcgcgacgcacgcacacacacggggggaaacttttttaaaaatgaaaggctagaagagctcagcggcggcgcgggccgtgcgcgagggctccggagctgactcgccgaggcaggaaatccctccggtcgcgacgcccggccccgctcggcgcccgcgtgggatggtgcagcgctcgccgccgggcccgagagctgctgcactgaaggccggcgacgatggcagcgcgcccgctgcccgtgtcccccgcccgcgccctcctgctcgccctggccggtgctctgctcgcgccctgcgaggcccgaggggtgagcttatggaaccaaggaagagctgatgaagttgtcagtgcctctgttcggagtggggacctctggatcccagtgaagagcttcgactccaagaatcatccagaagtgctgaatattcgactacaacgggaaagcaaagaactgatcataaatctggaaagaaatgaaggtctcattgccagcagtttcacggaaacccactatctgcaagacggtactgatgtctccctcgctcgaaattacacggtaattctgggtcactgttactaccatggacatgtacggggatattctgattcagcagtcagtctcagcacgtgttctggtctcaggggacttattgtgtttgaaaatgaaagctatgtcttagaaccaatgaaaagtgcaaccaacagatacaaactcttcccagcgaagaagctgaaaagcgtccggggatcatgtggatcacatcacaacacaccaaacctcgctgcaaagaatgtgtttccaccaccctctcagacatgggcaagaaggcataaaagagagaccctcaaggcaactaagtatgtggagctggtgatcgtggcagacaaccgagagtttcagaggcaaggaaaagatctggaaaaagttaagcagcgattaatagagattgctaatcacgttgacaagttttacagaccactgaacattcggatcgtgttggtaggcgtggaagtgtggaatgacatggacaaatgctctgtaagtcaggacccattcaccagcctccatgaatttctggactggaggaagatgaagcttctacctcgcaaatcccatgacaatgcgcagcttgtcagtggggtttatttccaagggaccaccatcggcatggccccaatcatgagcatgtgcacggcagaccagtctgggggaattgtcatggaccattcagacaatccccttggtgcagccgtgaccctggcacatgagctgggccacaatttcgggatgaatcatgacacactggacaggggctgtagctgtcaaatggcggttgagaaaggaggctgcatcatgaacgcttccaccgggtacccatttcccatggtgttcagcagttgcagcaggaaggacttggagaccagcctggagaaaggaatgggggtgtgcctgtttaacctgccggaagtcagggagtctttcgggggccagaagtgtgggaacagatttgtggaagaaggagaggagtgtgactgtggggagccagaggaatgtatgaatcgctgctgcaatgccaccacctgtaccctgaagccggacgctgtgtgcgcacatgggctgtgctgtgaagactgccagctgaagcctgcaggaacagcgtgcagggactccagcaactcctgtgacctcccagagttctgcacaggggccagccctcactgcccagccaacgtgtacctgcacgatgggcactcatgtcaggatgtggacggctactgctacaatggcatctgccagactcacgagcagcagtgtgtcacactctggggaccaggtgctaaacctgcccctgggatctgctttgagagagtcaattctgcaggtgatccttatggcaactgtggcaaagtctcgaagagttcctttgccaaatgcgagatgagagatgctaaatgtggaaaaatccagtgtcaaggaggtgccagccggccagtcattggtaccaatgccgtttccatagaaacaaacatccccctgcagcaaggaggccggattctgtgccgggggacccacgtgtacttgggcgatgacatgccggacccagggcttgtgcttgcaggcacaaagtgtgcagatggaaaaatctgcctgaatcgtcaatgtcaaaatattagtgtctttggggttcacgagtgtgcaatgcagtgccacggcagaggggtgtgcaacaacaggaagaactgccactgcgaggcccactgggcacctcccttctgtgacaagtttggctttggaggaagcacagacagcggccccatccggcaagcagataaccaaggtttaaccataggaattctggtgaccatcctgtgtcttcttgctgccggatttgtggtttatctcaaaaggaagaccttgatacgactgctgtttacaaataagaagaccaccattgaaaaactaaggtgtgtgcgcccttcccggccaccccgtggcttccaaccctgtcaggctcacctcggccaccttggaaaaggcctgatgaggaagccgccagattcctacccaccgaaggacaatcccaggagattgctgcagtgtcagaatgttgacatcagcagacccctcaacggcctgaatgtccctcagccccagtcaactcagcgagtgcttcctcccctccaccgggccccacgtgcacctagcgtccctgccagacccctgccagccaagcctgcacttaggcaggcccaggggacctgtaagccaaacccccctcagaagcctctgcctgcagatcctctggccagaacaactcggctcactcatgccttggccaggaccccaggacaatgggagactgggctccgcctggcacccctcagacctgctccacaatatccacaccaagtgcccagatccacccacaccgcctatattaagtgagaagccgacaccttttttcaacagtgaagacagaagtttgcactatctttcagctccagttggagttttttgtaccaacttttaggattttttttaatgtttaaaacatcattactataagaactttgagctactgccgtcagtgctgtgctgtgctatggtgctctgtctacttgcacaggtacttgtaaattattaatttatgcagaatgttgattacagtgcagtgcgctgtagtaggcatttttaccatcactgagttttccatggcaggaaggcttgttgtgcttttagtattttagtgaacttgaaatatcctgcttgatgggattctggacaggatgtgtttgctttctgatcaaggccttattggaaagcagtcccccaactacccccagctgtgcttatggtaccagatgcagctcaagagatcccaagtagaatctcagttgattttctggattccccatctcaggccagagccaaggggcttcaggtccaggctgtgtttggctttcagggaggccctgtgccccttgacaactggcaggcaggctcccagggacacctgggagaaatctggcttctggccaggaagctttggtgagaacctgggttgcagacaggaatcttaaggtgtagccacaccaggatagagactggaacactagacaagccagaacttgaccctgagctgaccagccgtgagcatgtttggaaggggtctgtagtgtcactcaaggcggtgcttgatagaaatgccaagcacttctttttctcgctgtcctttctagagcactgccaccagtaggttatttagcttgggaaaggtggtgtttctgtaagaaacctactgcccaggcactgcaaaccgccacctccctatactgcttggagctgagcaaatcaccacaaactgtaatacaatgatcctgtattcagacagatgaggactttccatgggaccacaactattttcagatgtgaaccattaaccagatctagtcaatcaagtctgtttactgcaaggttcaacttattaacaattaggcagactctttatgcttgcaaaaactacaaccaatggaatgtgatgttcatgggtatagttcatgtctgctatcattattcgtagatattggacaaagaaccttctctatggggcatcctctttttccaacttggctgcaggaatctttaaaagatgcttttaacagagtctgaacctatttcttaaacacttgcaacctacctgttgagcatcacagaatgtgataaggaaatcaacttgcttatcaacttcctaaatattatgagatgtggcttgggcagcatccccttgaactcttcactcttcaaatgcctgactagggagccatgtttcacaaggtctttaaagtgactaatggcatgagaaatacaaaaatactcagataaggtaaaatgccatgatgcctctgtcttctggactggttttcacattagaagacaattgacaacagttacataattcactctgagtgttttatgagaaagccttcttttggggtcaacagttttcctatgctttgaaacagaaaaatatgtaccaagaatcttggtttgccttccagaaaacaaaactgcatttcactttcccggtgttccccactgtatctaggcaacatagtattcatgactatggataaactaaacacgtgacacaaacacacacaaaagggaacccagctctaatacattccaactcgtatagcatgcatctgtttattctatagttattaagttctttaaaatgtaaagccatgctggaaaataatactgctgagatacatacagaattactgtaactgattacacttggtaattgtactaaagccaaacatatatatactattaaaaaggtttacagaattttatggtgcattacgtgggcattgtctttttagatgcccaaatccttagatctggcatgttagcccttcctccaattataagaggatatgaaccaaaaaaaaaaaaaaaaaaa

SEQ ID NO: 2 - DNA, 9645 bp, Homo sapiens
atgcccaagcgcgcgcactggggggccctctccgtggtgctgatcctgctttggggccatccgcgagtggcgctggcctgcccgcatccttgtgcctgctacgtccccagcgaggtccactgcacgttccgatccctggcttccgtgcccgctggcattgctagacacgtggaaagaatcaatttggggtttaatagcatacaggccctgtcagaaacctcatttgcaggactgaccaagttggagctacttatgattcacggcaatgagatcccaagcatccccgatggagctttaagagacctcagctctcttcaggttttcaagttcagctacaacaagctgagagtgatcacaggacagaccctccagggtctctctaacttaatgaggctgcacattgaccacaacaagatcgagtttatccaccctcaagctttcaacggcttaacgtctctgaggctactccatttggaaggaaatctcctccaccagctgcaccccagcaccttctccacgttcacatttttggattatttcagactctccaccataaggcacctctacttagcagagaacatggttagaactcttcctgccagcatgcttcggaacatgccgcttctggagaatctttacttgcagggaaatccgtggacctgcgattgtgagatgagatggtttttggaatgggatgcaaaatccagaggaattctgaagtgtaaaaaggacaaagcttatgaaggcggtcagttgtgtgcaatgtgcttcagtccaaagaagttgtacaaacatgagatacacaagctgaaggacatgacttgtctgaagccttcaatagagtcccctctgagacagaacaggagcaggagtattgaggaggagcaagaacaggaagaggatggtggcagccagctcatcctggagaaattccaactgccccagtggagcatctctttgaatatgaccgacgagcacgggaacatggtgaacttggtctgtgacatcaagaaaccaatggatgtgtacaagattcacttgaaccaaacggatcctccagatattgacataaatgcaacagttgccttggactttgagtgtccaatgacccgagaaaactatgaaaagctatggaaattgatagcatactacagtgaagttcccgtgaagctacacagagagctcatgctcagcaaagaccccagagtcagctaccagtacaggcaggatgctgatgaggaagctctttactacacaggtgtgagagcccagattcttgcagaaccagaatgggtcatgcagccatccatagatatccagctgaaccgacgtcagagtacggccaagaaggtgctactttcctactacacccagtattctcaaacaatatccaccaaagatacaaggcaggctcggggcagaagctgggtaatgattgagcctagtggagctgtgcaaagagatcagactgtcctggaagggggtccatgccagttgagctgcaacgtgaaagcttctgagagtccatctatcttctgggtgcttccagatggctccatcctgaaagcgcccatggatgacccagacagcaagttctccattctcagcagtggctggctgaggatcaagtccatggagccatctgactcaggcttgtaccagtgcattgctcaagtgagggatgaaatggaccgcatggtatatagggtacttgtgcagtctccctccactcagccagccgagaaagacacagtgacaattggcaagaacccaggggagtcggtgacattgccttgcaatgctttagcaatacccgaagcccaccttagctggattcttccaaacagaaggataattaatgatttggctaacacatcacatgtatacatgttgccaaatggaactctttccatcccaaaggtccaagtcagtgatagtggttactacagatgtgtggctgtcaaccagcaaggggcagaccattttacggtgggaatcacagtgaccaagaaagggtctggcttgccatccaaaagaggcagacgcccaggtgcaaaggctctttccagagtcagagaagacatcgtggaggatgaagggggctcgggcatgggagatgaagagaacacttcaaggagacttctgcatccaaaggaccaagaggtgttcctcaaaacaaaggatgatgccatcaatggagacaagaaagccaagaaagggagaagaaagctgaaactctggaagcattcggaaaaagaaccagagaccaatgttgcagaaggtcgcagagtgtttgaatctagacgaaggataaacatggcaaacaaacagattaatccggagcgctgggctgatattttagccaaagtccgtgggaaaaatctccctaagggcacagaagtacccccgttgattaaaaccacaagtcctccatccttgagcctagaagtcacaccaccttttcctgctgtttctcccccctcagcatctcctgtgcagacagtaaccagtgctgaagaatcctcagcagatgtacctctacttggtgaagaagagcacgttttgggtaccatttcctcagccagcatggggctagaacacaaccacaatggagttattcttgttgaacctgaagtaacaagcacacctctggaggaagttgttgatgacctttctgagaagactgaggagataacttccactgaaggagacctgaaggggacagcagcccctacacttatatctgagccttatgaaccatctcctactctgcacacattagacacagtctatgaaaagcccacccatgaagagacggcaacagagggttggtctgcagcagatgttggatcgtcaccagagcccacatccagtgagtatgagcctccattggatgctgtctccttggctgagtctgagcccatgcaatactttgacccagatttggagactaagtcacaaccagatgaggataagatgaaagaagacacctttgcacaccttactccaacccccaccatctgggttaatgactccagtacatcacagttatttgaggattctactataggggaaccaggtgtcccaggccaatcacatctacaaggactgacagacaacatccaccttgtgaaaagtagtctaagcactcaagacaccttactgattaaaaagggtatgaaagagatgtctcagacactacagggaggaaatatgctagagggagaccccacacactccagaagttctgagagtgagggccaagagagcaaatccatcactttgcctgactccacactgggtataatgagcagtatgtctccagttaagaagcctgcggaaaccacagttggtaccctcctagacaaagacaccacaacagtaacaacaacaccaaggcaaaaagttgctccgtcatccaccatgagcactcacccttctcgaaggagacccaacgggagaaggagattacgccccaacaaattccgccaccggcacaagcaaaccccacccacaacttttgccccatcagagactttttctactcaaccaactcaagcacctgacattaagatttcaagtcaagtggagagttctctggttcctacagcttgggtggataacacagttaatacccccaaacagttggaaatggagaagaatgcagaacccacatccaagggaacaccacggagaaaacacgggaagaggccaaacaaacatcgatataccccttctacagtgagctcaagagcgtccggatccaagcccagcccttctccagaaaataaacatagaaacattgttactcccagttcagaaactatacttttgcctagaactgtttctctgaaaactgagggcccttatgattccttagattacatgacaaccaccagaaaaatatattcatcttaccctaaagtccaagagacacttccagtcacatataaacccacatcagatggaaaagaaattaaggatgatgttgccacaaatgttgacaaacataaaagtgacattttagtcactggtgaatcaattactaatgccataccaacttctcgctccttggtctccactatgggagaatttaaggaagaatcctctcctgtaggctttccaggaactccaacctggaatccctcaaggacggcccagcctgggaggctacagacagacatacctgttaccacttctggggaaaatcttacagaccctccccttcttaaagagcttgaggatgtggatttcacttccgagtttttgtcctctttgacagtctccacaccatttcaccaggaagaagctggttcttccacaactctctcaagcataaaagtggaggtggcttcaagtcaggcagaaaccaccacccttgatcaagatcatcttgaaaccactgtggctattctcctttctgaaactagaccacagaatcacacccctactgctgcccggatgaaggagccagcatcctcgtccccatccacaattctcatgtctttgggacaaaccaccaccactaagccagcacttcccagtccaagaatatctcaagcatctagagattccaaggaaaatgttttcttgaattatgtggggaatccagaaacagaagcaaccccagtcaacaatgaaggaacacagcatatgtcagggccaaatgaattatcaacaccctcttccgaccgggatgcatttaacttgtctacaaagctggaattggaaaagcaagtatttggtagtaggagtctaccacgtggcccagatagccaacgccaggatggaagagttcatgcttctcatcaactaaccagagtccctgccaaacccatcctaccaacagcaacagtgaggctacctgaaatgtccacacaaagcgcttccagatactttgtaacttcccagtcacctcgtcactggaccaacaaaccggaaataactacatatccttctggggctttgccagagaacaaacagtttacaactccaagattatcaagtacaacaattcctctcccattgcacatgtccaaacccagcattcctagtaagtttactgaccgaagaactgaccaattcaatggttactccaaagtgtttggaaataacaacatccctgaggcaagaaacccagttggaaagcctcccagtccaagaattcctcattattccaatggaagactccctttctttaccaacaagactctttcttttccacagttgggagtcacccggagaccccagatacccacttctcctgccccagtaatgagagagagaaaagttattccaggttcctacaacaggatacattcccatagcaccttccatctggactttggccctccggcacctccgttgttgcacactccgcagaccacgggatcaccctcaactaacttacagaatatccctatggtctcttccacccagagttctatctcctttataacatcttctgtccagtcctcaggaagcttccaccagagcagctcaaagttctttgcaggaggacctcctgcatccaaattctggtctcttggggaaaagccccaaatcctcaccaagtccccacagactgtgtccgtcaccgctgagacagacactgtgttcccctgtgaggcaacaggaaaaccaaagcctttcgttacttggacaaaggtttccacaggagctcttatgactccgaataccaggatacaacggtttgaggttctcaagaacggtaccttagtgatacggaaggttcaagtacaagatcgaggccagtatatgtgcaccgccagcaacctgcacggcctggacaggatggtggtcttgctttcggtcaccgtgcagcaacctcaaatcctagcctcccactaccaggacgtcactgtctacctgggagacaccattgcaatggagtgtctggccaaagggaccccagccccccaaatttcctggatcttccctgacaggagggtgtggcaaactgtgtcccccgtggagagccgcatcaccctgcacgaaaaccggaccctttccatcaaggaggcgtccttctcagacagaggcgtctataagtgcgtggccagcaatgcagccggggcggacagcctggccatccgcctgcacgtggcggcactgccccccgttatccaccaggagaagctggagaacatctcgctgcccccggggctcagcattcacattcactgcactgccaaggctgcgcccctgcccagcgtgcgctgggtgctcggggacggtacccagatccgcccctcgcagttcctccacgggaacttgtttgttttccccaacgggacgctctacatccgcaacctcgcgcccaaggacagcgggcgctatgagtgcgtggccgccaacctggtaggctccgcgcgcaggacggtgcagctgaacgtgcagcgtgcagcagccaacgcgcgcatcacgggcacctccccgcggaggacggacgtcaggtacggaggaaccctcaagctggactgcagcgcctcgggggacccctggccgcgcatcctctggaggctgccgtccaagaggatgatcgacgcgctcttcagttttgatagcagaatcaaggtgtttgccaatgggaccctggtggtgaaatcagtgacggacaaagatgccggagattacctgtgcgtagctcgaaataaggttggtgatgactacgtggtgctcaaagtggatgtggtgatgaaaccggccaagattgaacacaaggaggagaacgaccacaaagtcttctacgggggtgacctgaaagtggactgtgtggccaccgggcttcccaatcccgagatctcctggagcctcccagacgggagtctggtgaactccttcatgcagtcggatgacagcggtggacgcaccaagcgctatgtcgtcttcaacaatgggacactctactttaacgaagtggggatgagggaggaaggagactacacctgctttgctgaaaatcaggtcgggaaggacgagatgagagtcagagtcaaggtggtgacagcgcccgccaccatccggaacaagacttacttggcggttcaggtgccctatggagacgtggtcactgtagcctgtgaggccaaaggagaacccatgcccaaggtgacttggttgtccccaaccaacaaggtgatccccacctcctctgagaagtatcagatataccaagatggcactctccttattcagaaagcccagcgttctgacagcggcaactacacctgcctggtcaggaacagcgcgggagaggataggaagacggtgtggattcacgtcaacgtccagccacccaagatcaacggtaaccccaaccccatcaccaccgtgcgggagatagcagccgggggcagtcggaaactgattgactgcaaagctgaaggcatccccaccccgagggtgttatgggcttttcccgagggtgtggttctgccagctccatactatggaaaccggatcactgtccatggcaacggttccctggacatcaggagtttgaggaagagcgactccgtccagctggtatgcatggcacgcaacgagggaggggaggcgaggttgatcgtgcagctcactgtcctggagcccatggagaaacccatcttccacgacccgatcagcgagaagatcacggccatggcgggccacaccatcagcctcaactgctctgccgcggggaccccgacacccagcctggtgtgggtccttcccaatggcaccgatctgcagagtggacagcagctgcagcgcttctaccacaaggctgacggcatgctacacattagcggtctctcctcggtggacgctggggcctaccgctgcgtggcccgcaatgccgctggccacacggagaggctggtctccctgaaggtgggactgaagccagaagcaaacaagcagtatcataacctggtcagcatcatcaatggtgagaccctgaagctcccctgcacccctcccggggctgggcagggacgtttctcctggacgctccccaatggcatgcatctggagggcccccaaaccctgggacgcgtttctcttctggacaatggcaccctcacggttcgtgaggcctcggtgtttgacaggggtacctatgtatgcaggatggagacggagtacggcccttcggtcaccagcatccccgtgattgtgatcgcctatcctccccggatcaccagcgagcccaccccggtcatctacacccggcccgggaacaccgtgaaactgaactgcatggctatggggattcccaaagctgacatcacgtgggagttaccggataagtcgcatctgaaggcaggggttcaggctcgtctgtatggaaacagatttcttcacccccagggatcactgaccatccagcatgccacacagagagatgccggcttctacaagtgcatggcaaaaaacattctcggcagtgactccaaaacaacttacatccacgtcttctgaaatgtggattccagaatgattgcttaggaactgacaacaaagcggggtttgtaagggaagccaggttggggaataggagctcttaaataatgtgtcacagtgcatggtggcctctggtgggtttcaagttgaggttgatcttgatctacaattgttgggaaaaggaagcaatgcagacacgagaaggagggctcagccttgctgagacactttcttttgtgtttacatcatgccaggggcttcattcagggtgtctgtgctctgactgcaatttttcttcttttgcaaatgccactcgactgccttcataagcgtccataggatatctgaggaacattcatcaaaaataagccatagacatgaacaacacctcactaccccattgaagacgcatcacctagttaacctgctgcagtttttacatgatagactttgttccagattgacaagtcatctttcagttatttcctctgtcacttcaaaactccagcttgcccaataaggatttagaaccagagtgactgatatatatatatatattttaattcagagttacatacatacagctaccattttatatgaaaaaagaaaaacatttcttcctggaactcactttttatataatgttttatatatatattttttcctttcaaatcagacgatgagactagaaggagaaatactttctgtcttattaaaattaataaattattggtctttacaagacttggatacattacagcagacatggaaatataattttaaaaaatttctctccaacctccttcaaattcagtcaccactgttatattaccttctccaggaaccctccagtggggaaggctgcgatattagatttccttgtatgcaaagtttttgttgaaagctgtgctcagaggaggtgagaggagaggaaggagaaaactgcatcataactttacagaattgaatctagagtcttccccgaaaagcccagaaacttctctgcagtatctggcttgtccatctggtctaaggtggctgcttcttccccagccatgagtcagtttgtgcccatgaataatacacgacctgttatttccatgactgctttactgtatttttaaggtcaatatactgtacatttgataataaaataatattctcccaaaaaaaaaa

SEQ ID NO: 3 - DNA, 540 bp, Homo sapiens
tttcaaatgttgccaaagtcatgggaactctagttaggaagatttcccctacttagagcatgtcactctggcgtggaccttcattcatctctttccccggcctggggttgatccattctcccttcttcccccttctcctgccctgcccccaccttctcagtcacaatctttgtcttcccagtttggcaggacatcccaggggcccctgggctttccttcctgaggttagaagatggtgctttgaaagaacaattgctcctaccacccatcaaatcaaacttttagaagctgataaaaaccttaaaaatcattcaatctcctcttctttctccttctgtagatgaggaatctgagggtctaagaggagacatgagctgctgagattgactgagctaggcagggccagacatagactccacgggcaggcccgcagtctttccaccaggtcaggccactccctcgcccagggctcaagattccttttagagttcaacagagcagctcccgagaacagaccagccctcaagactcaaatttcag

SEQ ID NO: 4 - DNA, 1986 bp, Homo sapiens
gttttctcatttgcaaccacccatgctggcatgaaagaaagtgaagctgctgggttgaactccatcttctgggggacatttgcagcctgcaggggcctggcaatcttttttgctacctgtttacagcctggaaccatgattgtgttgagcaacattggcagcctgacttcatctttatttctggtgctttttgacaagaacccaatttgtctctggatagcaacttcagtgtatggggcttcaatggcaaccacatttccgagtggtgtttcttggattgagcagtacacgaccatccatgggaaatctgcagcattttttgtaattggtgcttccctgggagaaatggctattcctgcagtcattggaattcttcaaggaaaataccctgatttgcctgtagttctgtatacctctttgggagcatcaatagctactggtattttatttcctgtgctatataaattagccacttcacctcttgatcgccagcgaaaagaagacagaaagagtgaggaccagaaagctctgctctctagctccgggctaaatgaatatgaggaagagaatgaagaggaggatgcagaaaaatggaatgaaatggattttgaaatgattgaaacgaatgatacaatgaggcattctataatagagacatctagaagtagtctgacggagcccacagctgaagtctataatcaatacccatcaaatgcactggtgtttgagtcttctccttttaatactggcagtgcccatgtgaagcacttgccagaaaccaggacaaaagggactaacgtttagagaagatggattactcactgacatctttgaataactgccacttctaaggacgccattcagagcagagcattagcagaatttcaccatgctttggggattaaaatttttaggtccatattatagcaaatgctaaaaatttttgaaatgttctgtaattcccagagtcttccataaataaccaaatggtctcatacacgtacaataggatcttgttataacgctatcatttgacatgtgactgattaggaaatattttatggtctccacccctcagagcacccaaagaaggcattgtttttgagaaggggggtattctcagaatgagaccatgtaggagttgaattgattggttgaacaaattatcaggtatcaatatttttccaggaaagttgaggagaatagtttcataaaagagaaatgggccgggattacaggcttgagcccccgcgcccagccatcaaaatgctttttatttctgcatatgttgaatactttttacaatttaaaaaaatgatctgttttgaaggcaaaattgcaaatcttgaaattaagaaggcaaaaatgtaaaggagtcaaaactataaatcaagtatttgggaagtgaagactggaagctaatttgcattaaattcacaaacttttatactctttctgtatatacattttttttctttaaaaaacaactatggatcagaatagccacatttagaacactttttgttatcagtcaatatttttagatagttagaacctggtcctaagcctaaaagtgggcttgattctgcagtaaatcttttacaactgcctcgacacacataaacctttttaaaaatagacactccccgaagtcttttgttcgcatggtcacacactgatgcttagatgttccagtaatctaatatggccacagtagtcttgatgaccaaagtcctttttttccatctttagaaaactacatgggaacaaacagatcgaacagttttgaagctactgtgtgtgtgaatgaacactcttgctttattccagaatgctgtacatctattttggattgtatattgtgtttgtgtatttacgctttgattcatagtaacttcttatggaattgatttgcattgaacacaaactgtaaataaaaagaaatggctgaaagaaaaaaaaaaaaaaaaaaaaaaaaaaaaaaaa

SEQ ID NO: 5 - DNA, 7288 bp, Homo sapiens
catagagccagcgggcgcgggcgggacgggcgccccgcggccggacccagccagggcaccacgctgcccggccctgcgccgccaggcacttctttccggggctcctagggacgccagaaggaagtcaacctctgctgcttctccttggcctgcgttggaccttcctttttttgttgtttttttttgtttttcccctttcttccttttgaattaactggcttcttggctggatgttttcaacttctttcctggctgcgaacttttccccaattgttttccttttacaacagggggagaaagtgctctgtggtccgaggcgagccgtgaagttgcgtgtgcgtggcagtgtgcgtggcaggatgtgcgtgcgtgtgtaacccgagccgcccgatctgtttcgatctgcgccgcggagccctccctcaaggcccgctccacctgctgcggttacgcggcgctcgtgggtgttcgtgcctcggagcagctaaccggcgggtgctgggcgacggtggaggagtatcgtctcgctgctgcccgagtcagggctgagtcacccagctgatgtagacagtggctgccttccgaagagtgcgtgtttgcatgtgtgtgactctgcggctgctcaactcccaacaaaccagaggaccagccacaaacttaaccaacatccccaaacccgagttcacagatgtgggagagctgtagaaccctgagtgtcatcgactgggccttcttatgattgttgttttaagattagctgaagatctctgaaacgctgaattttctgcactgagcgttttgacagaattcattgagagaacagagaacatgacaagtacttctagctcagcactgctccaactactgaagctgattttcaaggctacttaaaaaaatctgcagcgtacattaatggatttctgttgtgtttaaattctccacagattgtattgtaaatattttatgaagtagagcatatgtatatatttatatatacgtgcacatacattagtagcactacctttggaagtctcagctcttgcttttcgggactgaagccagttttgcatgataaaagtggccttgttacgggagataattgtgttctgttgggactttagacaaaactcacctgcaaaaaactgacaggcattaactactggaacttccaaataatgtgtttgctgatcgttttactcttcgcataaatattttaggaagtgtatgagaattttgccttcaggaacttttctaacagccaaagacagaacttaacctctgcaagcaagattcgtggaagatagtctccactttttaatgcactaagcaatcggttgctaggagcccatcctgggtcagaggccgatccgcagaaccagaacgttttcccctcctggactgttagtaacttagtctccctcctcccctaaccacccccgcccccccccaccccccgcagtaataaaggcccctgaacgtgtatgttggtctcccgggagctgcttgctgaagatccgcgcccctgtcgccgtctggtaggagctgtttgcagggtcctaactcaatcggcttgttgtgatgcgtatccccgtagatgccagcacgagccgccgcttcacgccgccttccaccgcgctgagcccaggcaagatgagcgaggcgttgccgctgggcgccccggacgccggcgctgccctggccggcaagctgaggagcggcgaccgcagcatggtggaggtgctggccgaccacccgggcgagctggtgcgcaccgacagccccaacttcctctgctccgtgctgcctacgcactggcgctgcaacaagaccctgcccatcgctttcaaggtggtggccctaggggatgttccagatggcactctggtcactgtgatggctggcaatgatgaaaactactcggctgagctgagaaatgctaccgcagccatgaagaaccaggttgcaagatttaatgacctcaggtttgtcggtcgaagtggaagagggaaaagcttcactctgaccatcactgtcttcacaaacccaccgcaagtcgccacctaccacagagccatcaaaatcacagtggatgggccccgagaacctcgaagacatcggcagaaactagatgatcagaccaagcccgggagcttgtccttttccgagcggctcagtgaactggagcagctgcggcgcacagccatgagggtcagcccacaccacccagcccccacgcccaaccctcgtgcctccctgaaccactccactgcctttaaccctcagcctcagagtcagatgcaggatacaaggcagatccaaccatccccaccgtggtcctacgatcagtcctaccaatacctgggatccattgcctctccttctgtgcacccagcaacgcccatttcacctggacgtgccagcggcatgacaaccctctctgcagaactttccagtcgactctcaacggcacccgacctgacagcgttcagcgacccgcgccagttccccgcgctgccctccatctccgacccccgcatgcactatccaggcgccttcacctactccccgacgccggtcacctcgggcatcggcatcggcatgtcggccatgggctcggccacgcgctaccacacctacctgccgccgccctaccccggctcgtcgcaagcgcagggaggcccgttccaagccagctcgccctcctaccacctgtactacggcgcctcggccggctcctaccagttctccatggtgggcggcgagcgctcgccgccgcgcatcctgccgccctgcaccaacgcctccaccggctccgcgctgctcaaccccagcctcccgaaccagagcgacgtggtggaggccgagggcagccacagcaactcccccaccaacatggcgccctccgcgcgcctggaggaggccgtgtggaggccctactgaggcgccaggcctggcccggctgggccccgcgggccgccgccttcgcctccgggcgcgcgggcctcctgttcgcgacaagcccgccgggatcccgggccctgggcccggccaccgtcctggggccgagggcgcccgacggccaggatctcgctgtaggtcaggcccgcgcagcctcctgcgcccagaagcccacgccgccgccgtctgctggcgccccggccctcgcggaggtgtccgaggcgacgcacctcgagggtgtccgccggccccagcacccaggggacgcgctggaaagcaaacaggaagattcccggagggaaactgtgaatgcttctgatttagcaatgctgtgaataaaaagaaagattttatacccttgacttaactttttaaccaagttgtttattccaaagagtgtggaattttggttggggtggggggagaggagggatgcaactcgccctgtttggcatctaattcttatttttaatttttccgcaccttatcaattgcaaaatgcgtatttgcatttgggtggtttttatttttatatacgtttatataaatatatataaattgagcttgcttctttcttgctttgaccatggaaagaaatatgattcccttttctttaagttttatttaacttttcttttggacttttgggtagttgtttttttttgttttgttttgtttttttgagaaacagctacagctttgggtcatttttaactactgtattcccacaaggaatccccagatatttatgtatcttgatgttcagacatttatgtgttgataattttttaattatttaaatgtacttatattaagaaaaatatcaagtactacattttcttttgttcttgatagtagccaaagttaaatgtatcacattgaagaaggctagaaaaaaagaatgagtaatgtgatcgcttggttatccagaagtattgtttacattaaactccctttcatgttaatcaaacaagtgagtagctcacgcagcaacgtttttaataggatttttagacactgagggtcactccaaggatcagaagtatggaattttctgccaggctcaacaagggtctcatatctaacttcctccttaaaacagagaaggtcaatctagttccagagggttgaggcaggtgccaataattacatctttggagaggatttgatttctgcccagggatttgctcaccccaaggtcatctgataatttcacagatgctgtgtaacagaacacagccaaagtaaactgtgtaggggagccacatttacataggaaccaaatcaatgaatttaggggttacgattatagcaatttaagggccaccagaagcaggcctcgaggagtcaatttgcctctgtgtgcctcagtggagacaagtgggaaaacatggtcccacctgtgcgagaccccctgtcctgtgctgctcactcaacaacatctttgtgttgctttcaccaggctgagaccctaccctatggggtatatgggcttttacctgtgcaccagtgtgacaggaaagattcatgtcactactgtccgtggctacaattcaaaggtatccaatgtcgctgtaaattttatggcactatttttattggaggatttggtcagaatgcagttgttgtacaactcataaatactaactgctgattttgacacatgtgtgctccaaatgatctggtggttatttaacgtacctcttaaaattcgttgaaacgatttcaggtcaactctgaagagtatttgaaagcaggacttcagaacagtgtttgatttttattttataaatttaagcattcaaattaggcaaatctttggctgcaggcagcaaaaacagctggacttatttaaaacaacttgtttttgagttttcttatatatatattgattatttgttttacacacatgcagtagcactttggtaagagttaaagagtaaagcagcttatgttgtcaggtcgttcttatctagagaagagctatagcagatctcggacaaactcagaatatattcactttcatttttgacaggattccctccacaactcagtttcatatattattccgtattacatttttgcagctaaattaccataaaatgtcagcaaatgtaaaaatttaatttctgaaaagcaccattagcccatttcccccaaattaaacgtaaatgttttttttcagcacatgttaccatgtctgacctgcaaaaatgctggagaaaaatgaaggaaaaaattatgtttttcagtttaattctgttaactgaagatattccaactcaaaaccagcctcatgctctgattagataatcttttacattgaacctttactctcaaagccatgtgtggagggggcttgtcactattgtaggctcactggattggtcatttagagtttcacagactcttaccagcatatatagtatttaattgtttcaaaaaaaatcaaactgtagttgttttggcgataggtctcacgcaacacatttttgtatgtgtgtgtgtgtgcgtgtgtgtgtgtgtgtgtgaaaaattgcattcattgacttcaggtagattaaggtatctttttattcattgccctcaggaaagttaaggtatcaatgagacccttaagccaatcatgtaataactgcatgtgtctggtccaggagaagtattgaataagccatttctactgcttactcatgtccctatttatgatttcaacatggatacatatttcagttctttctttttctcactatctgaaaatacatttccctccctctcttccccccaatatctccctttttttctctcttcctctatcttccaaaccccactttctccctcctccttttcctgtgttctcttaagcagatagcacatacccccacccagtaccaaatttcagaacacaagaaggtccagttcttcccccttcacataaaggaacatggtttgtcagcctttctcctgtttatgggtttcttccagcagaacagagacattgccaaccatattggatctgcttgctgtccaaaccagcaaactttcctgggcaaatcacaatcagtgagtaaatagacagcctttctgctgccttgggtttctgtgcagataaacagaaatgctctgattagaaaggaaatgaatggttccactcaaatgtcctgcaatttaggattgcagatttctgccttgaaatacctgtttctttgggacattccgtcctgatgatttttatttttgttggtttttatttttggggggaatgacatgtttgggtcttttatacatgaaaatttgtttgacaataatctcacaaaacatattttacatctgaacaaaatgcctttttgtttaccgtagcgtatacatttgttttgggatttttgtgtgtttgttgggaattttgtttttagccaggtcagtattgatgaggctgatcatttggctctttttttccttccagaagagttgcatcaacaaagttaattgtatttatgtatgtaaatagattttaagcttcattataaaatattgttaatgcctataactttttttcaatttttttgtgtgtgtttctaaggactttttcttaggtttgctaaatactgtagggaaaaaaatgcttctttctactttgtttattttagactttaaaatgagctacttcttattcacttttgtaaacagctaatagcatggttccaattttttttaagttcactttttttgttctaggggaaatgaatgtgcaaaaaaagaaaaagaactgttggttatttgtgttattctggatgtataaaaatcaatggaaaaaaataaactttcaaattgaaatgacggtataacacatctactgaaaaagcaacgggaaatgtggtcctatttaagccagcccccacctagggtctatttgtgtggcagttattgggtttggtcacaaaacatcctgaaaattcgtgcgtgggcttctttctccctggtacaaacgtatggaatgcttcttaaaggggaactgtcaagctggtgtcttcagccagatgacatgagagaatatcccagaaccctctctccaaggtgtttctagatagcacaggagagcaggcactgcactgtccacagtccacggtacacagtcgggtgggccgcctcccctctcctgggagcattcgtcgtgcccagcctgagcagggcagctggactgctgctgttcaggagccaccagagccttcctctctttgtaccacagtttcttctgtaaatccagtgttacaatcagtgtgaatggcaaataaacagtttgacaagtacatacaccataaaaaaaaaaaaaaaa

SEQ ID NO: 6 - DNA, 1466 bp, Homo sapiens
ggagaattggagaagcttgtgccctgctggaaagtgggatggcagtacccgcttcatctagtagtcggggagatcaagagaggtatgggacctgaagaggatggcagactgtgcagtgcggtgcacaccggtctccaggttgttttcaccctcctgtctcctcccaggagctaacgtgtaagcaaacatgtttggatagagggctggtgccacgccccaggctcaccccgcccgcacagccgtcgtccacccctcccctttcttacagataaagctgaggctcggccagggactgtgatatacccacatccccggaactaggtgatcgcggtgcaggaaccaggtgtgccttcgcgggatccatgccttgaggcccaggaacgccccgccgccagcatgccgtgggacgcgcggcggcctgggggtggcgcggacggcgggcccgaggcctcgggcgcggcgcgctcgcgagcgcagaagcagtgccgcaagtcgtcgttcgccttctaccaggcggtgcgcgacctgctacccgtgtggctgctggaggatatgcgcgccagcgaggccttccactgggacgagcgcgggcgcgccgccgcctactcgccctctgaggcgctgctctacgcgctcgtgcacgaccaccaagcgtacgcgcattacctgctggccacgttcccgcggcgcgcgctcgcaccgcccagtgccggcttccgctgctgcgcggctcccgggccgcacgtggcgctggcagtgcgctacaaccgcgtgggcattctgcgccgcatcctgcgcaccttgcgcgacttcccggccgaggagcgggcgcgcgtgctggaccggcgtggctgcagccgcgtggagggcggtggcacgtcgctgcacgtggcctgtgagctggcgcgccccgagtgcctcttcctgctgctgggccacggcgcctcgcccggtctgcgggacggcggcggcctcacgcctctcgagctgctgctgcgccagctgggccgcgacgccggggccactccctccgccgccggagcccccgcctcagctcccggggagccgcgccagcgccgcctgctgctgctggacctcctggcgctgtacacccccgtgggtgccgccggctcggcccgccaggagctgctgggcgaccggccgcgctggcagcggctgctgggtgaggacaagttccagtggctggcgggcctggcgccgccctcgctcttcgcgcgcgccatgcaggtgctggtcaccgccatctctccaggccgcttccccgaggccctggacgagctgccgctgcccccattcctgcagccgttggacctcactggcaaaggctaggcccggagcaccctaggcgctggattttgggacaaaactatttttcagagcgttgtaccggcactttatatatattgatctctgtacggcaaaaaaaaaaaaaaaaaaaaaaaaaa

SEQ ID NO: 7 - DNA, 768 bp, Homo sapiens
  misc_feature (7)..(7): n is a, c, g, or t
  misc_feature (14)..(14): n is a, c, g, or t
  misc_feature (22)..(22): n is a, c, g, or t
  misc_feature (392)..(393): n is a, c, g, or t
atttganccccttnccttgaanccccatcgtatcgggacgcgcgccattgtgttggtacccgggaattcggccattatggccgggagaaacgagatgggggtgaagctggagatatttcggatgataatctacctcactttccctgtggctatgttctgggtttccaatcaggccgagtggtttgaggacgatgtcatacagcgcaagagggagctgtggccacctgagaagcttcaagagatagaggaattcaaagagaggttacggaagcggcgggaggagaagctccttcgcgacgcccagcagaactcctgaggcctccaagtgggagtcctagcccctcccctgatgaaatatacatatactcagttccttgttaagaaaaaaaaannaaaaaaaaaaaaaaaaaaacatgtcggccgcctcggcccagtcgactctagactcgagcaagcttatgcatgcggccgcaattcgagctcacttggccaattcgccctatagtgagtcgtatcacaattcactggcccgcgttttacaacgtcgtgacttggaaaaactcttgccgttacccaacctaaattgcctttgaacaaaaatcccctttgcgcaagttggctaatatccaagagagcccgaaccaatcggcctttccaacagttgcccagcttgatgccaattgaaattgtgagccttaaattttggttaaattcgggtaaatttttggttaatcagctcaatttttaacccaaaggccatggcccttt

SEQ ID NO: 8 - DNA, 515 bp, Homo sapiens
atttcaaacaaatccaaaacttatttttgtttatagaaacaagacaacacacagtaaaattgaggaaatacaatagttttttcaatatagtaccacaagccattttttctgtaaaggaccaaatattagatactatcacaaaacattttatcactcattcaaaacaagaatcattcagttgccccaggaaaaaacacactgaaattattttagatagcataataagctagaggatatagaacatttgaaaaacagttccaaaaaatggaatactaaagatgcaacattaattcttagtacatttgttatggtaatgaattaaagcattatagaatatattcaagtcagaaatcctgtagtatgaagacataccttcatatgtgaaaatattattttatattaataataattattctggtatttatatcagatttatcatcagattttctttcctgaatttattaataatttgaccatggaacacaaaaatatttcattcattttataatactttg

SEQ ID NO: 9 - DNA, 534 bp, Homo sapiens
tttgatatcattaaagtttattcaagaattgtttgacagacaacccttttaggtaaggaaaaaagtaactactgaagaacaaagaaagttccaagagggaattaactctagttctacaaattcaggactatacagtgacgattaggagctgagttcatgccttttagaactaattacaattgttcgtaagtacgagtttaacataaatctacagctcttttctagagtacaatagtaactaaaatagctggttttacatgacaggaaacacaatgtcctttgtaacaggtaaatactaaaaaagtacaattttttcctttttttccctcatataaatacataatgtagggggataaataatacaaaaaagaaaatattttaacaggctataaccaataaatatatatgaaaatgttcactagaacacacgcttttttgagcaatgctggacttctgcaggcccagacatctctcacagttgtttttacatccattaaaatgtaaattctaagtgcaacaaaagtgtcctgtcag

SEQ ID NO: 10 - DNA, 469 bp, Homo sapiens
ttacgttttatttttatttatttactttttttagagatggagtctcactctgttgccaggctggagtgcagcggtgtgatcttggctcactgcaacttccgccccctgggttcaagtgattctcctgcctcagccttccaagtagctgggattacaggcatgcaccaccacacctggctaatttttgtatctttagtagagacggggtttcaccatgttggccaggatggtcttgatctcttgacctggtgatctgcctgcctcagcctcccaaagtgctgggatacaggtgtgagccaccgtgcctggcctatgtatttttttttttaaacacacacataaatctaaagcaaagggtatgccaagattcagctggggccaggtctgacccccactctgagcatctcattagcttcccatcagtggaatacaatggagacatattccacttggtctggcaatgtcctcc

SEQ ID NO: 11 - DNA, 2599 bp, Homo sapiens
cagattcacaaactgcaggactgggcagggagcagacagtgagcaaacgccagcagggctgctgtgaatttgtgtaaggattgagggacagttgcttttcagcatgggcccaggaatgccaaggagacatctatgcacgaccttgggaaatgagttgatgtctccggtaaaacaccggagactaattcctgccctgcccaattttgcagggagcatggctgtgaggatggggtgaactcacgcacagccaaggactccaaaatcacaacagcattactgttcttatttgctgccacacctgagccagcctgctccttcccaggagtggaggaggcctggggggagggagaggagtgactgagcttccctcccgtgtgttctccgtccctgccccagcaagacaacttagatctccaggagaactgccatccagctttggtgcaatggctgagtgcacaagtgagttgttgccctgggtttctttaatctattcagctagaactttgaaggacaatttcttgcattaataaaggttaagccctgaggggtccctgataacaacctggagaccaggattttatggctcccctcactgatggacaaggaggtctgtgccaaagaagaatccaataagcacatattgagcacttgctgtatatgcagtattgagcactgtaggcaagacccaagaaagagaaggagccatctccatcttgaaggaactcaaagactcaagtgggaacgactgggcactgccaccaccagaaagctgttcgacgagacggtcgagcagggtgctgtgggtgatatggacagcagaagggggagaccaaggttccagctcaaccaataactattgcacaaccacctgtccctgcctcagttcccttttatgtaacatgaagtcgttgtgagggttaaaggcagtaacaggtataaagtacttagaaaagcaaagggtgctacgtacatgtgaggcatcattacgcagacgtaactgggatatgtttactataaggaaaagacactgaggtctagaaatagctccgtggagcagaatcagtattgggagccggtggcggtgtgaagcaccagtgtctggcacacagtaggtgctcattggctcccttccacctgtcattcccaccaccctgaggccccaaccgccacacacacaggagcatttggagagaaggccatgtcttcaaagtctgatttgtgatgaggcagaggaagatatttctaatcggtcttgcccagaggatcacagtgctgagaccccccaccaccagccggtacctgggaagggggagagtgcaggcctgctcagggactgttcctgtctcagcaaccaagggattgttcctgtcaatcaatggtttattggaaggtggcccagtatgagccctagaagagtgtgaaaaggaatggcaatggtgttcaccatcggcagtgccagggcagcactcattcacttgataaatgaatatttattagctggttggagagctagaacctggagagctagaacctggagaactagaacctggagggctagaacctggagaggctagaaccaagaagggctagaacctggaggggctagaacctagagaagctaaaacctgagctagaagctggaggactagaacctggagggctggaatctgaagggctagaacctggagggctggaatctggagagctagaacctggagggctagaacctggagggctagaacctagaagggctagaacctggagggctggaatctggagagctagaacctggagggctagaacctggagggctagaacctagaagggctagaacctggagggctagaacctggcaggttagaacctagaagggctagaacctggagagccagaacctggagggctagaacctggaagggctagaacctgtagagctagaacatggagagctagaacccggcaggctagaacctggcaagctagaacctggagggaatgaacctggagggctagaacctggagaatgagaaaaatttacatggcaaagagcccataaatcctgaccaatccaactctgaattttaaagcaaaagcgtgaaaaaaaagattccctccttacccccaacccactcttttttcccaccacccactctcctctgcctcagtaagtatctggaggaagaaaacaggtgaaagaagaagtaaaaaccatttagtattagtattagaatgaagtcaaactgtgccacacatggtgaatgaaaaaaaaaaaaaagaggctgtgttttgtcacacagggcagtcattcagcaccagagcacgtgatggtctgagactctcttaggagcagagctctgccgcaatggccatgtggggatccacacctggtctgaggggcaactgagtctgcgggagaagagcggccctatgcatggtgtagatgccctgataaagaacatctgtcctgtgaaagactcaatgagctgttatgttgtaaacaggaagcatttcacatccaaacgagaaaatcatgtaaacatgtgtcttttctgtagagcataataaatggatgaggtttttgcaaaaaaaaaaaaaaaaa

SEQ ID NO: 12 - DNA, 5571 bp, Homo sapiens
attttccccgcacaactgctaaagctccagagacacgagcgtgtgtggcagcaagagccgccagttcgggaccaccgcagctggggtggcagcggcgcaggaggggtcgcggggagggagtggtgagcgcaggcggcaggggtctgggaaagacgaagtcgctatttgctgtctgagcgcgctcgcagctcctggaagtgttgccgcctctcggtttgtctcgcctgctgcgctcctagaagggcggccgcctccaggactgaccagggccaagtggcgctcggcgggcactacatggcggagggtgaagggtacttcgccatgtctgaggacgagctggcctgcagcccctacatccccctaggcggcgacttcggcggcggcgacttcggcggcggcgacttcggcggcggcggcacgttcggtgggcattgcttggactattgcgaaagccctacggcgcactgcaatgtgctgaactgggagcaagtgcagcggctggacggcatcctgagcgagaccattccgattcacgggcgcggcaacttccccacgctcgagctgcagccgagcctgatcgtgaaggtggtgcggcggcgcctggccgagaagcgcattggcgtccgcgacgtgcgcctcaacggctcggcagccagccatgtcctgcaccaggacagcggcctgggctacaaggacctggacctcatcttctcggccgacctgcgcggggaaggggagtttcagactgtgaaggacgtcgtgctggactgcctgttggacttcttacccgagggggtgaacaaagagaagatcacaccactcacgctcaaggaagcttatgtgcagaaaatggttaaagtgtgcaatgactctgaccgatggagtcttatatccctgtcaaacaacagtggcaaaaatgtggaactgaaatttgtggattccctccggaggcagtttgaattcagtgtagattcttttcaaatcaaattagactctcttctgctcttttatgaatgttcagagaacccaatgactgagacatttcaccccacaataatcggggagagcgtctatggcgatttccaggaagcctttgatcacctttgtaacaagatcattgccaccaggaacccagaggaaatccgagggggaggcctgcttaagtactgcaacctcttggtgaggggctttaggcccgcctctgatgaaatcaagacccttcaaaggtatatgtgttccaggtttttcatcgacttctcagacattggagagcagcagagaaaactggagtcctatttgcagaaccactttgtgggattggaagaccgcaagtatgagtatctcatgacccttcatggagtggtaaatgagagcacagtgtgcctgatgggacatgaaagaagacagactttaaaccttatcaccatgctggctatccgggtgttagctgaccaaaatgtcattcctaatgtggctaatgtcacttgctattaccagccagccccctatgtagcagatgccaactttagcaattactacattgcacaggttcagccagtattcacgtgccagcaacagacctactccacttggctaccctgcaattaagaatcatttaaaaatgtcctgtggggaagccatttcagacaagacaggagagaaaaaaaaaaaaaagaaaaaaaaaagagtgatccagcccttattagggatgtgttttgtgcaatgatgatatgctcctggttttaagtttggcaaagcttatgtatcttttaatagatgtgggagcatgatctcgaaaggatccttttcccttctcttattctcctacccaattggattctatcctgcaaaaaaagagagacctgtcattagaagcaaccaggttctcctgatacaagagaagaaatgtgtgatgacaatatgggtttgctgtatctgctcccatagctttgccataggaaaaaaaaaagtggaaagtttcttttaagatggaattcataaaagggaaaatacggaggaaaaaaggtctcactccaacttgtgaatcagtttaggagttcagatattaatagtaacaatacaggaaaaaggggaactccaacgttgggattactgtctgaggcttgtagcaagtgctttctgtggaatgatcttgttttgctaacaaacggcttgctccaaatgaacagtagtaggttggtgcagttctcgtaacaatcagcagaacttatgatgacacaatccattaattccagctgcgtgcatagatcacatttttaaaatgtaaaaatgcaagcaaaaacagctgtaacaaagaaagtgtgctcaaggaccaaagatttaacagataaaaatacccaattagaagagatatagtagactatatgaagagagattatatttgttacacaccaatatacatcaaagtgcctgttgccttctgaaaatttgaagtggcaaaattattttatggtttaatgattattttattttatcagggactgcctcaagaagaaaataacataagcttgtgaatggtggagaaaatgccctattttttcttgcaaatacttgtataaagttaacatttgttgatctgatattatcataggtacatgtgtatgtgtgtataaattatatgtgtgtgtgtatatatacattttatatatacattttatatgtatatatacacagtagattgactatgatctagaataatgtctcaaataggaaatgtttaaatactgtgtgtttttatgttttcaacaggataacatgagacgtgggcatattgcaatgatgaattaaatccacatctaaaaaaattaaatgaaggagggaaccaagtaatatatttcataggaagagcagaaattatactgttttagtgggatttttttttctttttttttttttctttggtgagccataaaattccacaaatgggagaatatttgtttggcagagcactcttttttatattgaactgccattttgacagttggaacccatttattaaaaaaaaaattgcattcctctatgatgtttaatctagtggatcatggatcagtaataggctacttaaatccctgactgctaaaaaggatttccggtgatctaaacactacttgctaatgtttaaatgaattttaatgaatgcattctgcatttctggaccactagaatttagtaatgtgaaatgaccctttttacagaatatttgcacaattgcttaaaatttatatatgagatatatattatatataacattttataaatcatgtcaatatgaaacatctttgatctggttgtcacactgcatttaaatatttagtactgtactttaaatcgctttccattaaatcaaatccaactttattttctttcttacaaaaataccagttatacctttgtgaaatgaactggcattactatttcagttcaataacagctaatcctaaaaccaccctttctcctagccagtagttcctctagatactggtctctgaaaatgcatttgttaaaaacaaaacaaaactaacacataagaaccttccctttgtgttgtgaaacaaccacataatctccacaaccttagtggatgactgcttgctatgataattcctcgaagacccaattagaagattttcatcatcagttaaagagagaccacgggagaaaaaaatatcctcctgttggcagtataatttgtttgtttgtttatctagggatcctcagatgcttagtgctaggttaatccaggttaatccgtctggactaccttttgtgcatctttctttgaagccttaatgggaacctgatgggtttgctgtagcagcttccttgtgaattctgtcagagctgcaacagccgctgcactgccactcagttttctaaggaactcctcctactaccatcttggctcagtctccctcacttaagccctgggtttgaaaaattaattgcaacttcccaggaaacattgttcagtttgcagattaagcctggcactcacctatcagaaaccagagctccgcctgcttagttgtttcaaagttttctgaaagaaaactaggggagcacttgtgaacacaggagcagctggtgatctgctttcttaccctaactcttgacaaatgagtcgtctactattttaaagagtctggaggtctctgactctgccataacaataacctgctgttaatttataacacagatttttgtttggaagagccttatttgaaatacactttgatttattttcttaaatatttatattcttttcttgcttacttcagggttggtagcttagttggaagtgccagcacctggcacctattcatatagaacaggctgtactcaagacaacttctagcatttactttaagacttatataatttatttctattttgtgtgtactatagtcttgtgcatatgtagttgaacacacagtgaaatatatgtctctctttgtggatgtgcggcctaaaaatttgaatgtctggtgagagagagccatgtgtataggtcagagaaaagaacagctcccgactccctattagcgcctgtgatttgtttccttttgtgtttatctggcctagtgtgctgtttctttaaaccaggaagaagttttgtcttttggaggctcttctcacctgtccagcctggcatgtcagagaacacatagcctgtgacaatgccgtttttaaaggtttacttaatttgcagtaaatccagctgcctcaagaactcctacaccaagatggacatttcctttccagaaatgggatcaagtatctgctcactttggtattggatggactaataatgtagctccaaaaatgcaaggatggaagaatatgtgtaatccaaaccaaggaaggaaatgaaaagtgaacgtactgtttttaccacccctttctgtttgcttattgttggttgcttcactgtgcataaagttgttttcaatgcaacgcttgttaaataaatattgtgaactattttgtaaatgaaatgtattatgttgaaagctgtcagttcaaaaataagcttttttgttgttgttgaagatgaagtgtgttaggtgaaaccaaaaagccaaaaaaagtaatttcatatatagcatctatttgaatataatctttctttaaaatttcttttagcatagcattttcagtgctaagaaagaatctctatgttatattttgttaaaataatggctttctaacaaagcaaatggtaaagtacaaagttggaagatgtcaagttaacgagacttgctgcaaagccttgcagaacggaggaggctcgcctgctggctgtctctccctccaacctctctacaatcatgcctgctttgaggtgttctgttgcagcaagctgcaccttgggtcactcttttggaatattttgactataggctgcgtcacaggcagaaaaggagttgatggaaaatggactaaaaaactgacatgtttgaatcagtgctagagggaacagattgtgaattttgtttacagcatccaatatttggatttttttgtaaataaaaaagttatttttttctattg

SEQ ID NO: 13 - DNA, 3093 bp, Homo sapiens
aggaagtggtgagttcggagtagagatggccgcgcttgcaccgctgcccccgctccccgcacagttcaagagcatacagcatcatctgaggacggctcaggagcatgacaagcgagaccctgtggtggcttattactgtcgtttatacgcaatgcagactggaatgaagatcgatagtaaaactcctgaatgtcgcaaatttttatcaaagttaatggatcagttagaagctctaaagaagcagttgggtgataatgaagctattactcaagaaatagtgggctgtgcccatttggagaattatgctttgaaaatgtttttgtatgcagacaatgaagatcgtgctggacgatttcacaaaaacatgatcaagtccttctatactgcaagtcttttgatagatgtcataacagtatttggagaactcactgatgaaaatgtgaaacacaggaagtatgccagatggaaggcaacatacatccataattgtttaaagaatggggagactcctcaagcaggccctgttggaattgaagaagataatgatattgaagaaaatgaagatgctggagcagcctctctgcccactcagccaactcagccatcatcatcttcaacttatgacccaagcaacatgccatcaggcaactatactggaatacagattcctccgggtgcacacgctccagctaatacaccagcagaagtgcctcacagcacaggtgtagcaagtaatactatccaacctactccacagactatacctgccattgatcccgcacttttcaatacaatttcccagggggatgttcgtctaaccccagaagactttgctagagctcagaagtactgcaaatatgctggcagtgctttgcagtatgaagatgtaagcactgctgtccagaatctacaaaaggctctcaagttactgacgacaggcagagaatgaagcctttgtatgacagacccatgtatttttggcatgaggaactaacagtccattactctatcttcagcctatcaggatcacagttttaaggaagacttggttttgttgaatatgacaatgaaatctgtgtgtatcagatttttattgaagcattcatcagcagcctcaaccagttttcattgtccatttactagattcaatcgtctctgagtatatagggctgatgttagcaagaccctaaaaatgtccattgaaccctgcttcaaaaaatgaaaacacacctctataaaatgtgtactgggaataagctttgtatttacatacattaggggaattttttaaaatctgtaatgtttggacaaacagatgatattactttgctataaaattataaatgtaacttttaataaagatagccagaatattctaaattagaaattacgtttttgtttccctcaagacataaaacaaatataaacattctaaactgctggatgaatctgaaaagacattaagttcaaattttaatttattctcatattaaatataactccattaaaagtttaaaatttcatgggagaaaatataataaggtaaagaggtagaatcactttcagacttaagaataatgttgatttcccaagtgctttaccttatctgttaaagcgtaagatgaattggtatttgcttcataggcagtttgactgcatgtattagagaatgaaaagaagatatttgtagtaatgcctggaaacttggtgctttaaattaaggtactcctctgctgctgtagaatggattccacacagtggatagctatgggtgattcagaatattatgtttagattcccatttgttaagtttataagttttgtggggaattatgaacttactgtgtactacctgcatttgtgctgtgtgaaaaataaatacaaggattcgtttagctaattcaacttactacaaagacaaatgtctgtttttatttgcctgctaggattgtcttttttaaaagtcatttttatttataggaatatgggtgtttctataggaagaaacaggttttttgttttttgttttttaagataaatttgacaaagttaactgaaatttatctggtccattttattcatgctactaagatgggaatctttaaacacaagggtcagcaagctttggcccatggattggccacctgttacgtaaataaagtttctttgaaacaagcctacactcattcatttatgttttgtctgtggttgctttccacaactgcagagttgtatggcttgcaagtctaaaaacatttactatttggccctctaagaaaaagttaagacacctagtctaatggccttttgggaaaaaacaaatcactaactcataatcatttatatccattattttctgcataaatgtaatgctattgtacagggtttggtagaataaatattcagactgactaaactgttctaaatcctcacaaaaaagtccccaaacaacatgcctcctaaaaaacattttcctatcttttacaagaggtatgaacatttgtagggttccacatttgcatctagaaatccaatgctctttagaatgttattacgaatagaaagatggccaggatgacctttagtgttacatgatgttcagcaaattttaattcaaaccttgatatgcctggacactgaaaagtaaacgcatcacctcctattttatacactaccttctggttcccaattgggagagcacatagagggaaggagacaatatagaaactacggagtccgctggtagtgggctgcatggtgtgacagagcccttctctgtaaaatggaaatgacaccactagccatctcaatagttacaagaattaaaagagatacagtacctgaagtgcttagcgcatggtagcatttcataaatgtttagtgtcaatactaatgctctaataatgtaaattgttaataatttatttccctaatatcaggaaatcccagttgtctatgtggcccagtgcttaaaaacgccttcttgcatgaggggattgaactatacaatgtttgttaactttgtatttgtattttttcctataaaatcttaaaataaaattaggagatgtgttccgaaaaaaaaaaaaaaaa

SEQ ID NO: 14 - DNA, 2114 bp, Homo sapiens
ccacgcgtccgaccaatgtcatccccaaaggaagggtgagctgaatggaaattaagcccagtcattttatttgatctattagctctgttatcagtgcatgatcacccagatcaccctcctcagcccacacagtgctgaaccatcttccctcctgttctccatggctattaatagtatagctaaatttagagtgcagagccagatataagtattttggaattatctcccagtttgtggtagaagctgactggaatacaggttgagtatctcttatccaaaatgctagggaccagaaaggtttcagattttttcagattttggaatacttaacagttgagcaccccaaatctgaaaggcttctgaacgtcatgtcagcactcaaaaaagtggattttggagcacttcaaatttcggatttttggatttgggatgctcatcctgtgtaggagaggctactcgattccatttaatgactgtcctagtcataatcatccaaagataaaagccaggtagatgttgaaagctctttccagggctgaaaaagtgttcttacgttctctgcatgtgactagcatcactgtggaaattaatgctctgttcttcactagaatgtagtaagtggttaaactgagctatcccccacctgatgactattggcatccatttgcaaggccaatggcctggattaagggttaggattatttgtagctagaaggtaattttatttctgtgaaactaattggctcatatttgaggttaggtgtggccttgaccttaccagtacatttatacccactaccagttgactagcccagataattgttaaatggtgcttcttttctgcttctcagtagacttccatgccattacaaaggaaatttgaattacctagtgtttgtatattccatgataactatgtataacttctgttacacagcttatgtattgttaacatttaagtgtaaaccatgccacagctaacacttaaaaatgaaaactaattagttcttgcttagggaaaatgccaggtatgaagtatggcatatacttgacactgtcctgtgtaaccctttactttgctcaggctttcaagattgagtcttttttcccccaaattaggttaacatgcatttgaccccaacctgtggggtttgagtaagctggaaatctgtgacggtaggctttctagtgtcacgaggtggtggtgactgaaggaaaagctgggatcacaggttccttctgatggagaggaaggtttatttctatgcccctcccaccaccctccacctagagctcacccaagcctgctccagtcccaggggcaggccattctgcaaaagcaggacctcacagaaacaagggctgggttgaggtcacccccttcagagttggttcctggccagatgggtaagaggcatttgtaattttaaaaatgtgaaacttgggtttggtgttttcttctaagtgcctaaataagcaagccaggctgttgatattttagccagagaaatcggcaagccaagattaacccgaatctgaagtttagaatcttgagtttgcatctgcatcatatcatgctgttttgatgaggaaacatttgccactgaggagttggagggagggcaagacgacagtgttaagtcagatcatttaatggtttcccctaagccctggaaaaatatttgaaagaatggcagcaaaaaggttaagaaagcaagccagatttactgcacaatatgcagtacccagtactactttaaatcccaagagaacagtgtgatgtctaatatatacaggtctatgaaaatactgtggaataagcccaggaaggttagatgtgtttgcaaataagttgcccaaagggtccccctctaagtaaaacaaatattcagaccacaggctttaatgtaaactgtcaaaaagtgggatgtggaggatttttgttaagtgtcaatcgaagttaaaaagcaagggtttttggccaggcgtggtggctcacgcctgtaatcccagcactttgggaggccgaggccggcaaatcacctaaggtcaggagttcgagaccagcctggccaacatggtgaaaccccgtctctactaaaaaaaaaaaaaaa

SEQ ID NO: 15 - DNA, 2756 bp, Homo sapiens
gttgctagagataccgcctggaggccactgatctgtaaaagggatctctacagaagatagggatttttgatcgccagagaagaagggatatgtgagatccaaacgccgaaggaggaaagcaggctccgtggtctcttccagccctgatggaagaaactaccgagccttattatactaggtgctttccacatgcctattcatttaatcctccagcaaccttgtaagaagggccatcccattttatatttaaacaaaccttaactactgacgcaaggagtcaaggatctaatcccaaagcctctgcctggttcgctgcagatggatgtccgcgaggacgccagccctccgcctcccgccgggtccctgaacgccggcccggccggtccaacctcattccgcttcccgccatcgaaacgcgaagcccccgccttcccccaaacgtctcagcgccgctggggcctttctggctgcgccgcctccgaccccaggccccggtccgcgcccgccgctcgctagtcctgggagtgaggagaacgcgtgctgaggacccggccagagggacagcggggaccgccctcccgctgcgtctctgaaagcgaggccgttcctcccgcgtccgacccccgcggggccgtcaggttcggggcggcccaggctgcgggtccgcagggcgcttcgggccgagccggcgcggcgcgtgaagggcaggggacgccccgaaagaccgctggggtgggaccccaagctccaggggtctttggaaataagaatgcggcgtgacgttggctgtgcgggcgcggggctgacgcggaccctataacccatcgccgaaaccgggcggccgcgcccctattcctcggcatttctctctgtccgcggccctgctcagccaatcagcgagtgggctcctaggcaggtcctgagtgacagcgcggcgggctggatcaggagatgcgcgtgcgcggcccggcccggctgatcgcttcgggtgctcgactcctgttgcgcatgctcagcgcgctgcccggctggggacccgcgcacctgcagcgcccgctgctcggccctgcatcctgcctgggcatcctgcgcccggccatgacggcgcactcattcgccctcccggtcatcatcttcaccacgttctggggcctcgtcggcatcgccgggccctggttcgtgccgaagggacccaaccgcggagtgatcatcaccatgctggtcgccaccgccgtctgctgttacctcttctggctcatcgccatcctggcgcagctgaaccccctgttcgggccccagctgaagaatgagaccatctggtacgtgcgcttcctgtgggagtgacccgccgcccccgacccaggtgcccagctctcggaatgactgtggctccactgtccctgacaaccccttcgtccggaccctcccccacacaactatgtctggtcaccagctccctcctgctggcacccagagacccggacccgcagggcctgcctggttcctggaagtcttcccagtcttcccagccagcccgggccctggggagccctgggcacagcagcggccgaggggatgtcctgctccaatacccgcactgctctggagtttgccctctttcccaaggagatgctgctggggagctggtatgggtggggtctttccctttacagacggggcagatgccaggactcagcccatcctgaggaggacacgtgtcctcatggagagggtgctccggcccaggcgggggagtcagtgcccagtcagcagctctgccaccatcctgctgggaactgggggggcctctattgggttataggcaaggccttttctctggcatggaattgttaattttctgacacgtctagatgtgaaatttctgaaaatgttgaagcagagaaacattcacacacaaaaagcaacatagtcatgtgggtccagatggcctcagtcctagatgttggcaccctttgctgtgtctcctcagagtatcctgttccgcctcctgccacctggacctccctcagtggatgtcttccctcccccgaccccagcctgtcagtccgagcacagtgcaggtttggctctgacttgggcttttggctgcagtgggggtggatttcagagcctctcatggcagcatctaagtgaccagagctgggatgagagaggggaaggggcaatgtgagtggcgctatgggacgggccagccctgctcctgagccagccccgccctctgccccctggccctgggctctgtgctagggatggtgaagaatgggggcgtgccagcctggcaggagtgggaagcaacacgcaggggtcccggacctctccagccttgccctcacgcttacccgagctcccagtgtggttagcacagagctcacccaccttgcctggctcccagctggggcctgtcctcactggtgctccaggggaagaaacgacagcctcacttctgtatggactgctgatgtggcctgccatcctgttcagcgggcattgtctttggagcagcaggagaataggatgcctctcactcacatgccagttcctggctggccagctgctcagggctcaggctggggcctcccattgacatcctccccctacactccctctctgagcctccgtcgcccctcctgttgggtaagggtgttgagtgtgacttgtgctgaaaacctggttcatatataataaataatggtgatgaaaagattaaaaaaaaaaaaaaaaaaaaaaaaaaaaaa

SEQ ID NO: 16 - DNA, 2272 bp, Homo sapiens
aatgcacagcggtattgatgagtagatccttggattcagaggttggctgaaacgcaccatgcctgcttccatcttttgctctgtaaagttgtgaattgctcatgcctatagggaggaaggatggcacatgggattccttctcaaggcaaagttaccataacggtggatgagtacagctcaaaccccacccaggcattcacgcactacaacatcaaccagagcagattccagcctccacatgtacatatggtcgaccccatcccatatgacactccaaaaccagcgggccacacgcggtttgtctgcatctcagacacacactccagaacagatggtatccagatgccttatggggacatccttctccacacaggcgatttcaccgagctgggactgccctcagaggttaagaagtttaatgactggttaggaaacctgccatatgaatataaaatagtgattgctgggaatcatgaactgacatttgataaggaattcatggcagaccttgttaaacaggactactaccgtttcccctctgtgtccaaattgaaaccagaggactttgacaatgttcagtccctcctgacaaacagtatttacttacaagattcggaggtaacagtgaagggattcaggatatacggtgcaccttggaccccgtggtttaatggatggggctttaacctacccagaggtcagtctctgctggacaagtggaacctcatccctgagggcattgacatactcatgacacatggacctcctctaggttttcgagactgggttccaaaggagcttcaaagagtgggctgtgtggagctgttaaacacggttcagaggcgagtccggcccaagctccatgtgtttggtggaatccatgaaggttatggcatcatgaccgacggttacacaacgtacatcaatgcctcgacgtgtacagtcagctttcaaccgaccaaccctccaattatatttgaccttccaaacccacagggttcctgaagctctaaatgccctattggaatgtgagggaaggtctataaactgccatttttctaattataaacttacattctcttacttatttacaaaccctgtgagttctttttgtaaattgttggaacacaaatgatgctagaggttgtgcttcttattttattttattttaaatggggcatccatttgaaatcagaggaacattgtgaatttgtaaaatgacttctgttttctcaaaggccatgccattgtaaattgttagtgttcgccaaaggacagccaagctttcttttaaaaagtgataaaagtcttattttaatatgctttaagctgaaagaaaaaaaaataagaaacaggcagtgttttaaaaaccaacacagatttgcacaactgtttaagagtattgtttgaaatattttaattttcaatgttttgttgttgttgttttcttggtaatgcttcttttttgcagatgtggtcccaatttatagcaatcttctcaacagaagtaggcatggaaaagacttcttttcatactctcactataaagaaagctgcattgagaagaaaatggctgtcatttaaaggatggtttaactagtgagattcctattgtggttatacaaggtctcattgtttgtttgtttcttttaaattatttcagctttaaaaatacagaaatggaatctgtcaagagcaggtatttcatacggttaaaaaaatgaacatgcagactccttttcaatatgggtttatatatataagtattttttgtgtattatgactacgttaggagtttaatattgtcaaggacagtacaactgcaaagggatgctgtatagcagcacatcagaagtcggaaggaactgacacattctctcagagctcaaggtcttaaagagcttgagttaaatctaggtacagttacaggcatgtatagacttaaatggatgcaatggaagctaactaaaataaggcttagttgtcctttctatttaaataccccaagttgtcttcttacttcctctcccctctcccattttgcactgtgtgtcgatgcaatcttcgctagcacaaaatattgtcgctaatagtcatttctgttttcccattgtaaatgctgttgagctttattctattttatgttactttgttaatgaaatttaggaaagcagttgtttctttaaatttattgtgatattctatatctagcggcctttatatgcaaataaaattgcaagatttttaaaaaaaaaaaaaaaaaaaaaaaaaa

SEQ ID NO: 17 - DNA, 2180 bp, Homo sapiens
cccggagccagcggttctccaagcacccagcatcctgctagacgcgccgcgcaccgacggaggggacatgggcagagcaatggtggccaggctcgggctggggctgctgctgctggcactgctcctacccacgcagatttattccagtgaaacaacaactggaacttcaagtaactcctcccagagtacttccaactctgggttggccccaaatccaactaatgccaccaccaaggcggctggtggtgccctgcagtcaacagccagtctcttcgtggtctcactctctcttctgcatctctactcttaagagactcaggccaagaaacgtcttctaaatttccccatcttctaaacccaatccaaatggcgtctggaagtccaatgtggcaaggaaaaacaggtcttcatcgaatctactaattccacaccttttattgacacagaaaatgttgagaatcccaaatttgattgatttgaagaacatgtgagaggtttgactagatgatggatgccaatattaaatctgctggagtttcatgtacaagatgaaggagaggcaacatccaaaatagttaagacatgatttccttgaatgtggcttgagaaatatggacacttaatactaccttgaaaataagaatagaaataaaggatgggattgtggaatggagattcagttttcatttggttcattaattctataaggccataaaacaggtaatataaaaagcttccatgattctatttatatgtacatgagaaggaacttccaggtgttactgtaattcctcaacgtattgtttcgacagcactaatttaatgccgatatactctagatgaagttttacattgttgagctattgctgttctcttgggaactgaactcactttcctcctgaggctttggatttgacattgcatttgaccttttatgtagtaattgacatgtgccagggcaatgatgaatgagaatctacccccagatccaagcatcctgagcaactcttgattatccatattgagtcaaatggtaggcatttcctatcacctgtttccattcaacaagagcactacattcatttagctaaacggattccaaagagtagaattgcattgaccgcgactaatttcaaaatgctttttattattattattttttagacagtctcactttgtcgcccaggccggagtgcagtggtgcgatctcagatcagtgtaccatttgcctcccgggctcaagcgattctcctgcctcagcctcccaagtagctgggattacaggcacctgccaccatgcccggctaatttttgtaattttagtagagacagggtttcaccatgttgcccaggctggtttcgaactcctgacctcaggtgatccacccgcctcggcctcccaaagtgctgggattacaggcttgagcccccgcgcccagccatcaaaatgctttttatttctgcatatgttgaatactttttacaatttaaaaaaatgatctgttttgaaggcaaaattgcaaatcttgaaattaagaaggcaaaaatgtaaaggagtcaaaactataaatcaagtatttgggaagtgaagacgaagctaatttgcattaaattcacaaacttttatactctttctgtatatacattttttttctttaaaaaacaactatggatcagaatagccacatttggaacactttttgttatcagtcaatatttttagatagttagaacctggtcctaagcctaaaagtgggcttgattctgcagtaaatcttttacaactgcctcgacacacataaacctttttaaaaatagacactccccgaagtcttttgttcgcatggtcacacactgatgcttagatgttccagtaatctaatatggccacagtagtcttgatgaccaaagtcctttttttccatctttagaaaactacatgggaacaaacagatcgaacagttttgaagctactgtgtgtgtgaatgaacactcttttgctttattccagaatgctgtacatctattttggattgtatattgtgtttgtgtatttacgctttgattcatagtaacttcttatggaattgatttgcattgaacacaaactgtaaataaaaagaaatggctgaaagagcaaaaaaaaaaaaaaaaaaaaaaaaaaaaaaaaaaaaaaaaaa

SEQ ID NO: 18 - DNA, 2374 bp, Homo sapiens
acctggtgcgggaggcccgggcagggagaagtgtgcggggccgggacaagccggctccgagtgcggggcgggaggggcctgcgcggcggcgggagcccagagccgcgctaaagcgggtcaagcgtcctccttttctccccgccccttctcctcctcctacctgggcctctgcgtggagacgcgcacctggcaaccggaggccgcgtctccgccttctctgctcgcgcctggcgcccggagcctgcccgggacctccgccggagccgcgctcgctgcaggcggcctcgagcgctctctcgttgatgccgttttggaggtgaccggcgcggcggccgctctatggtggggccgcgttagtggctgcggctccgcgggactccagggcgcggctgcgaggtggcggggcgccccgcctgcagaaccctgcttgcagctcaggtttcggggtgcttgaggaggccgccacggcagcgcgggagcggaagatgttggagctgaggcaccggggaagctgccccggccccagggaagcggtgtcgccgccacaccgcgagggagaggcggccggcggcgaccacgaaaccgagagcaccagcgacaaagaaacagatattgatgacagatatggagatttggattccagaacagattctgatattccggaaattccaccatcctcagatagaacccctgagattctcaaaaaagctctatctggtttatcttcaaggtggaaaaactggtggatacgtggaattctcactctaactatgatctcgttgtttttcctgatcatctatatgggatccttcatgctgatgcttcttgttctgggcatccaagtgaaatgcttccatgaaattatcactataggttatagagtctatcattcttatgatctaccatggtttagaacactaagttggtactttctattgtgtgtaaactactttttctatggagagactgtagctgattattttgctacatttgttcaaagagaagaacaacttcagttcctcattcgctaccatagatttatatcatttgccctctatctggcaggtttctgcatgtttgtactgagtttggtgaagaaacattatcgtctgcagttttatatgttcgcatggactcatgtcactttactgataactgtcactcagtcacaccttgtcatccaaaatctgtttgaaggcatgatatggttccttgttccaatatcaagtgttatctgcaatgacataactgcttacctttttggatttttttttgggagaactccattaattaagttgtctcctaaaaagacttgggaaggattcattggtggtttcttttccacagttgtgtttggattcattgctgcctatgtgttatccaaataccagtactttgtctgcccagtggaataccgaagtgatgtaaactccttcgtgacagaatgtgagccctcagaacttttccagcttcagacttactcacttccaccctttctaaaggcagtcttgagacaggaaagagtgagcttgtaccctttccagatccacagcattgcactgtcaacctttgcatctttaattggcccatttggaggcttctttgctagtggattcaaaagagccttcaaaatcaaggattttgcaaataccattcctggacatggtgggataatggacagatttgattgtcagtatttgatggcaacttttgtacatgtgtacatcacaagttttatccggggcccaaatcccagcaaagtgctacagcagttgttggtgcttcaacctgaacagcagttaaatatatataaaaccctgaagactcatctcattgagaaaggaatcctacaacccaccttgaaggtataactggatccagagagggaaggactgacaagaaggaattattcagaaaaacactgacagatgttttataaattgtacagaaaaatagttaaaaatgcaataggttgaagttttggagatatgtttctctctgaaattactgtgaatatttaacaaacacttacttgatctatgttatgaaataagtagcaaattgccagcaaaatgtcttgtaccttttctaaagtgtattttctgatgtgaacttccttccccttacttgctaggtttcataatttaaaagagtcaaacactataaaatgagtaagttgacgatgttttaagattgcacctggcagtgtgcctttttgcacaaatatttacttttgcacttggagctgcttttaattttagcaaaatgttttatgcaaggcacaataggaagtcagttctcctgcacttcctcctcatgtagtctggagtactttctaaagggcttagttggatttaaaaaaaaaaaaaaaaaa

SEQ ID NO: 19 - DNA, 2757 bp, Homo sapiens
ggttgtccacagtctcgtagctaccaagtgacaggccacgatttgatctcaggccagtgtgttaaactccaatttgcgtgctcctgtccctccccgcgcgtcggcggagctcggggccggactggacctgccgagggaggggcggacagtcctgacggtgcggggcggggctggcggctgcccaggcctggctgaggcgccgcggccgggtccctctccacctgccgggcggagcgcacgggccatgggctgagccccgctgagcccgccgggccggccatgggcgatcgcgagcgcaacaagaagcggctgctggagctgctgcgggcgccggacacaggcaacgcgcactgcgccgactgcggggcggcagatcccgactgggcctcttacaagctggggatcttcatctgtctcaactgctgcggcgtccaccgtaacttccctgacatcagcagagttaaatctgtgcgacttgacttctgggacgacagtattgtggagtttatgatccacaatggaaacctccgtgtgaaggccaagttcgaagccagagtcccagctttctactacatcccccaggccaacgactgcctggtcttaaaggaacaatggattcgagctaagtatgagagacgggaatttatggctgatggggaaaccatctcgctcccaggtaaccgagaaggattcctgtggaagcgaggaagggacaactcacagtttctgagaaggaagtttgtacttctggcaagagaaggcctcctgaagtacttcacaaaggaacagggtaaaagccccaaagctgtcatcagcattaaggacttgaatgccaccttccagacagagaagatagggcacccccatgggctgcagatcacctacaggagagatggccacaccaggaacctgtttgtgtatcatgaaagtgggaaggagatagtggactggttcaatgccctccgtgcagcccgtctgcagtacctaaaaatggcctttcctgaactcccagagtctgagctcgtgccattcctcaccaggaactacctcaaacaaggcttcatggaaaagactgggccaaagcagaaagaacctttcaagaaaaggtggttcgccctggattgccatgagcggaggctgctctattacaagaacccactggatgccttcgagcagggccaggtttttcttgggaacaaggagcagggatatgaagcctacgaagacctgcccaagggcatccgaggaaatcgctggaaagccggactcaccattgtcaccccagagcggagatttgtcctcacttgccccagtgagaaggaacagcaggaatggctggaaagtttgcggggtgtcctgtccagccccttgacgcccctcaaccggcttactgcatcaacagagagtggccgcagcagcaggtgacccattaactgaggaactggctgccactgaacacctggaactccttgtgggaagaagtttgcacctcggccctggctgcccaccatcagtgccccgcagtcagcagccattcctggcagtgaactctgccaggactgaagctgtggctttatccatcagctccctgggccttccccgcaacccacctcggggatctgaggatctggtgcatagatgaacatctatcccctcctcccccatacacacctaggcttgaaatgccctacaggcccagaactttctcacatctgaaatggaggcattgcaatgaaaaggcacccacagcatcatgcaagtggcatcttgtaaaaaaaaaaaaaaagtttaatctgaatctaaccatgaggaaataatcagacaaatccacattaggggcattctgctaaacatctgacccagactcttcaaaaatgaagagtgaaagataaagtagtcaatggccgggcgcagtgagattgcgccattgcattccagcctgggtgacagagcgagactccgtatcagaaagaaaaagaggaactgaatgaaatctcagatggctgaaatgttagagaaacagagcaccaagtcccctgctctgtgactcgttgttcctttcctctgtcttcaagcaccacgcagaaatacactggatgttctctctttgcttcaatggagacccaaggagctgggaggtctcttaagagactctctgattctccgtggctgggtgtgatggctcatgcccataatcccagccctttgggaagctgaggcaggaggattgagaccaggagttcgagaagagcctgggcaacatagtgagaccccatctctacaaagaaaaaaaaattagctggacatggtaatgaatgcctgtagtcccagctactccggacactgatgtgagaggatcacttgagccagggaggtcatggctacagtgacccctcattgcaccactttacttagcctgggtgacagagtgagaccctatctcaaaaaaaaaaaaaatctatgcattgtatgggactttcctttggatcccccaatcaaaggataagcaatgcgtaagcctgtgtccttcctgaagcttctcgactgcccagatagggaggtgagtcctctctatctcctctggctctggaagcaccttgaaaatgtgcattttcaaggacacttgctgggttgtgcattaagggccagtttacttgtctgcctctttgaccacctgtgaactctgttgggtgtactctgctaagttctggggatgaggaaattaataaaggtacagtcttgccttcaaaaaaaaaa

SEQ ID NO: 20 - DNA, 3445 bp, Homo sapiens
gagcaaccgcagcttctagtatccagactccagcgccgccccgggcgcggaccccaaccccgacccagagcttctccagcggcggcgcagcgagcagggctccccgccttaacttcctccgcggggcccagccaccttcgggagtccgggttgcccacctgcaaactctccgccttctgcacctgccacccctgagccagcgcgggcgcccgagcgagtcatggccaacgcggggctgcagctgttgggcttcattctcgccttcctgggatggatcggcgccatcgtcagcactgccctgccccagtggaggatttactcctatgccggcgacaacatcgtgaccgcccaggccatgtacgaggggctgtggatgtcctgcgtgtcgcagagcaccgggcagatccagtgcaaagtctttgactccttgctgaatctgagcagcacattgcaagcaacccgtgccttgatggtggttggcatcctcctgggagtgatagcaatctttgtggccaccgttggcatgaagtgtatgaagtgcttggaagacgatgaggtgcagaagatgaggatggctgtcattgggggtgcgatatttcttcttgcaggtctggctattttagttgccacagcatggtatggcaatagaatcgttcaagaattctatgaccctatgaccccagtcaatgccaggtacgaatttggtcaggctctcttcactggctgggctgctgcttctctctgccttctgggaggtgccctactttgctgttcctgtccccgaaaaacaacctcttacccaacaccaaggccctatccaaaacctgcaccttccagcgggaaagactacgtgtgacacagaggcaaaaggagaaaatcatgttgaaacaaaccgaaaatggacattgagatactatcattaacattaggaccttagaattttgggtattgtaatctgaagtatggtattacaaaacaaacaaacaaacaaaaaacccatgtgttaaaatactcagtgctaaacatggcttaatcttattttatcttctttcctcaatataggagggaagatttttccatttgtattactgcttcccattgagtaatcatactcaattgggggaaggggtgctccttaaatatatatagatatgtatatatacatgtttttctattaaaaatagacagtaaaatactattctcattatgttgatactagcatacttaaaatatctctaaaataggtaaatgtatttaattccatattgatgaagatgtttattggtatattttctttttcgtctatatatacatatgtaacagtcaaatatcatttactcttcttcattagctttgggtgcctttgccacaagacctagcctaatttaccaaggatgaattctttcaattcttcatgcgtgcccttttcatatacttattttattttttaccataatcttatagcacttgcatcgttattaagcccttatttgttttgtgtttcattggtctctatctcctgaatctaacacatttcatagcctacattttagtttctaaagccaagaagaatttattacaaatcagaactttggaggcaaatctttctgcatgaccaaagtgataaattcctgttgaccttcccacacaatccctgtactctgacccatagcactcttgtttgctttgaaaatatttgtccaattgagtagctgcatgctgttcccccaggtgttgtaacacaactttattgattgaatttttaagctacttattcatagttttatatccccctaaactacctttttgttccccattccttaattgtattgttttcccaagtgtaattatcatgcgttttatatcttcctaataaggtgtggtctgtttgtctgaacaaagtgctagactttctggagtgataatctggtgacaaatattctctctgtagctgtaagcaagtcacttaatctttctacctcttttttctatctgccaaattgagataatgatacttaaccagttagaagaggtagtgtgaatattaattagtttatattactctcattctttgaacatgaactatgcctatgtagtgtctttatttgctcagctggctgagacactgaagaagtcactgaacaaaacctacacacgtaccttcatgtgattcactgccttcctctctctaccagtctatttccactgaacaaaacctacacacataccttcatgtggttcagtgccttcctctctctaccagtctatttccactgaacaaaacctacgcacataccttcatgtggctcagtgccttcctctctctaccagtctatttccattctttcagctgtgtctgacatgtttgtgctctgttccattttaacaactgctcttacttttccagtctgtacagaatgctatttcacttgagcaagatgatgtaatggaaagggtgttggcattggtgtctggagacctggatttgagtcttggtgctatcaatcaccgtctgtgtttgagcaaggcatttggctgctgtaagcttattgcttcatctgtaagcggtggtttgtaattcctgatcttcccacctcacagtgatgttgtggggatccagtgagatagaatacatgtaagtgtggttttgtaatttaaaaagtgctatactaagggaaagaattgaggaattaactgcatacgttttggtgttgcttttcaaatgtttgaaaacaaaaaaaatgttaagaaatgggtttcttgccttaaccagtctctcaagtgatgagacagtgaagtaaaattgagtgcactaaacaaataagattctgaggaagtcttatcttctgcagtgagtatggcccgatgctttctgtggctaaacagatgtaatgggaagaaataaaagcctacgtgttggtaaatccaacagcaagggagatttttgaatcataataactcataaggtgctatctgttcagtgatgccctcagagctcttgctgttagctggcagctgacgctgctaggatagttagtttggaaatggtacttcataataaactacacaaggaaagtcagccactgtgtcttatgaggaattggacctaataaattttagtgtgccttccaaacctgagaatatatgcttttggaagttaaaatttaaatggcttttgccacatacatagatcttcatgatgtgtgagtgtaattccatgtggatatcagttaccaaacattacaaaaaaattttatggcccaaaatgaccaacgaaattgttacaatagaatttatccaattttgatctttttatattcttctaccacacctggaaacagaccaatagacattttggggttttataataggaatttgtataaagcattactctttttcaataaattgttttttaatttaaaaaaaggaaaaaaaaaaaaaaaaa

SEQ ID NO: 21 - DNA, 7291 bp, Homo sapiens
acacagtactctcagcttgttggtggaagcccctcatctgccttcattctgaaggcagggcccggcagaggaaggatcagagggtcgcggccggagggtcccggccggtggggccaactcagagggagaggaaagggctagagacacgaagaacgcaaaccatcaaatttagaagaaaaagccctttgactttttccccctctccctccccaatggctgtgtagcaaacatccctggcgataccttggaaaggacgaagttggtctgcagtcgcaatttcgtgggttgagttcacagttgtgagtgcggggctcggagatggagccgtggtcctctaggtggaaaacgaaacggtggctctgggatttcaccgtaacaaccctcgcattgaccttcctcttccaagctagagaggtcagaggagctgctccagttgatgtactaaaagcactagattttcacaattctccagagggaatatcaaaaacaacgggattttgcacaaacagaaagaattctaaaggctcagatactgcttacagagtttcaaagcaagcacaactcagtgccccaacaaaacagttatttccaggtggaactttcccagaagacttttcaatactatttacagtaaaaccaaaaaaaggaattcagtctttccttttatctatatataatgagcatggtattcagcaaattggtgttgaggttgggagatcacctgtttttctgtttgaagaccacactggaaaacctgccccagaagactatcccctcttcagaactgttaacatcgctgacgggaagtggcatcgggtagcaatcagcgtggagaagaaaactgtgacaatgattgttgattgtaagaagaaaaccacgaaaccacttgatagaagtgagagagcaattgttgataccaatggaatcacggtttttggaacaaggattttggatgaagaagtttttgagggggacattcagcagtttttgatcacaggtgatcccaaggcagcatatgactactgtgagcattatagtccagactgtgactcttcagcacccaaggctgctcaagctcaggaacctcagatagatgagtatgcaccagaggatataatcgaatatgactatgagtatggggaagcagagtataaagaggctgaaagtgtaacagagggacccactgtaactgaggagacaatagcacagacggaggcaaacatcgttgatgattttcaagaatacaactatggaacaatggaaagttaccagacagaagctcctaggcatgtttctgggacaaatgagccaaatccagttgaagaaatatttactgaagaatatctaacgggagaggattatgattcccagaggaaaaattctgaggatacactatatgaaaacaaagaaatagacggcagggattctgatcttctggtagatggagatttaggcgaatatgatttttatgaatataaagaatatgaagataaaccaacaagcccccctaatgaagaatttggtccaggtgtaccagcagaaactgatattacagaaacaagcataaatggccatggtgcatatggagagaaaggacagaaaggagaaccagcagtggttgagcctggtatgcttgtcgaaggaccaccaggaccagcaggacctgcaggtattatgggtcctccaggtctacaaggccccactggaccccctggtgaccctggcgataggggccccccaggacgtcctggcttaccaggggctgatggtctacctggtcctcctggtactatgttgatgttaccgttccgttatggtggtgatggttccaaaggaccaaccatctctgctcaggaagctcaggctcaagctattcttcagcaggctcggattgctctgagaggcccacctggcccaatgggtctaactggaagaccaggtcctgtgggggggcctggttcatctggggccaaaggtgagagtggtgatccaggtcctcagggccctcgaggcgtccagggtccccctggtccaacgggaaaacctggaaaaaggggtcgtccaggtgcagatggaggaagaggaatgccaggagaacctggggcaaagggagatcgagggtttgatggacttccgggtctgccaggtgacaaaggtcacaggggtgaacgaggtcctcaaggtcctccaggtcctcctggtgatgatggaatgaggggagaagatggagaaattggaccaagaggtcttccaggtgaagctggcccacgaggtttgctgggtccaaggggaactccaggagctccagggcagcctggtatggcaggtgtagatggccccccaggaccaaaagggaacatgggtccccaaggggagcctgggcctccaggtcaacaagggaatccaggacctcagggtcttcctggtccacaaggtccaattggtcctcctggtgaaaaaggaccacaaggaaaaccaggacttgctggacttcctggtgctgatgggcctcctggtcatcctgggaaagaaggccagtctggagaaaagggggctctgggtccccctggtccacaaggtcctattggatacccgggcccccggggagtaaagggagcagatggtgtcagaggtctcaagggatctaaaggtgaaaagggtgaagatggttttccaggattcaaaggtgacatgggtctaaaaggtgacagaggagaagttggtcaaattggcccaagaggggaagatggccctgaaggacccaaaggtcgagcaggcccaactggagacccaggtccttcaggtcaagcaggagaaaagggaaaacttggagttccaggattaccaggatatccaggaagacaaggtccaaagggttccactggattccctgggtttccaggtgccaatggagagaaaggtgcacggggagtagctggcaaaccaggccctcggggtcagcgtggtccaacgggtcctcgaggttcaagaggtgcaagaggtcccactgggaaacctgggccaaagggcacttcaggtggcgatggccctcctggccctccaggtgaaagaggtcctcaaggacctcagggtccagttggattccctggaccaaaaggccctcctggaccacctgggaaggatgggctgccaggacaccctgggcaacgtggggagactggatttcaaggcaagaccggccctcctgggccagggggagtggttggaccacagggaccaaccggtgagactggtccaataggggaacgtgggcatcctggccctcctggccctcctggtgagcaaggtcttcctggtgctgcaggaaaagaaggtgcaaagggtgatccaggtcctcaaggtatctcagggaaagatggaccagcaggattacgtggtttcccaggggaaagaggtcttcctggagctcagggtgcacctggactgaaaggaggggaaggtccccagggcccaccaggtccagttggctcaccaggagaacgtgggtcagcaggtacagctggcccaattggtttaccagggcgcccgggacctcagggtcctcctggtccagctggagagaaaggtgctcctggagaaaaaggtccccaagggcctgcagggagagatggagttcaaggtcctgttggtctcccagggccagctggtcctgccggctcccctggggaagacggagacaagggtgaaattggtgagccgggacaaaaaggcagcaagggtgacaagggagaaaatggccctcccggtcccccaggtcttcaaggaccagttggtgcccctggaattgctggaggtgatggtgaaccaggtcctagaggacagcaggggatgtttgggcaaaaaggtgatgagggtgccagaggcttccctggacctcctggtccaataggtcttcagggtctgccaggcccacctggtgaaaaaggtgaaaatggggatgttggtcccatggggccacctggtcctccaggcccaagaggccctcaaggtcccaatggagctgatggaccacaaggacccccagggtctgttggttcagttggtggtgttggagaaaagggtgaacctggagaagcagggaacccagggcctcctggggaagcaggtgtaggcggtcccaaaggagaaagaggagagaaaggggaagctggtccacctggagctgctggacctccaggtgccaaggggccaccaggtgatgatggccctaagggtaacccgggtcctgttggttttcctggagatcctggtcctcctggggaacctggccctgcaggtcaagatggtgttggtggtgacaagggtgaagatggagatcctggtcaaccgggtcctcctggcccatctggtgaggctggcccaccaggtcctcctggaaaacgaggtcctcctggagctgcaggtgcagagggaagacaaggtgaaaaaggtgctaagggggaagcaggtgcagaaggtcctcctggaaaaaccggcccagtcggtcctcagggacctgcaggaaagcctggtccagaaggtcttcggggcatccctggtcctgtgggagaacaaggtctccctggagctgcaggccaagatggaccacctggtcctatgggacctcctggcttacctggtctcaaaggtgaccctggctccaagggtgaaaagggacatcctggtttaattggcctgattggtcctccaggagaacaaggggaaaaaggtgaccgagggctccctggaactcaaggatctccaggagcaaaaggggatgggggaattcctggtcctgctggtcccttaggtccacctggtcctccaggtttaccaggtcctcaaggcccaaagggtaacaaaggctctactggacccgctggccagaaaggtgacagtggtcttccagggcctcctgggtctccaggtccacctggtgaagtcattcagcctttaccaatcttgtcctccaaaaaaacgagaagacatactgaaggcatgcaagcagatgcagatgataatattcttgattactcggatggaatggaagaaatatttggttccctcaattccctgaaacaagacattgagcatatgaaatttccaatgggtactcagaccaatccagcccgaacttgtaaagacctgcaactcagccatcctgacttcccagatggtgaatattggattgatcctaaccaaggttgctcaggagattccttcaaagtttactgtaatttcacatctggtggtgagacttgcatttatccagacaaaaaatctgagggagtaagaatttcatcatggccaaaggagaaaccaggaagttggtttagtgaatttaagaggggaaaactgctttcatacttagatgttgaaggaaattccatcaatatggtgcaaatgacattcctgaaacttctgactgcctctgctcggcaaaatttcacctaccactgtcatcagtcagcagcctggtatgatgtgtcatcaggaagttatgacaaagcacttcgcttcctgggatcaaatgatgaggagatgtcctatgacaataatccttttatcaaaacactgtatgatggttgtgcgtccagaaaaggctatgaaaagactgtcattgaaatcaatacaccaaaaattgatcaagtacctattgttgatgtcatgatcaatgactttggtgatcagaatcagaagttcggatttgaagttggtcctgtttgttttcttggctaagattaagacaaagaacatatcaaatcaacagaaaatataccttggtgccaccaacccattttgtgccacatgcaagttttgaataaggatggtatagaaaacaacgctgcatatacaggtaccatttaggaaataccgatgcctttgtgggggcagaatcacatggcaaaagctttgaaaatcataaagatataagttggtgtggctaagatggaaacagggctgattcttgattcccaattctcaactctccttttcctatttgaatttctttggtgctgtagaaaacaaaaaaagaaaaatatatattcataaaaaatatggtgctcattctcatccatccaggatgtactaaaacagtgtgtttaataaattgtaattattttgtgtacagttctatactgttatctgtgtccatttccaaaacttgcacgtgtccctgaattccatctgactctaattttatgagaattgcagaactctgatggcaataaatatatgtattatgaaaaaataaagttgtaatttctgatgactctaagtccctttctttggttaataataaaatgcctttgtatatattgatgttgaagagttcaattatttgatgtcgccaacaaaattctcagagggcaaaaatctggaagacttttggaagcacactctgatcaactcttctctgccgacagtcattttgctgaatttcagccaaaaatattatgcattttgatgctttattcaaggctatacctcaaactttttcttctcagaatccaggatttcacaggatacttgtatatatggaaaacaagcaagtttatatttttggacagggaaatgtgtgtaagaaagtatattaacaaatcaatgcctccgtcaagcaaacaatcatatgtatactttttttctacgttatctcatctccttgttttcagtgtgcttcaataatgcaggttaatattaaagatggaaattaagcaattatttatgaatttgtgcaatgttagattttcttatcaatcaagttcttgaatttgattctaagttgcatattataacagtctcgaaaattattttacttgcccaacaaatattacttttttcctttcaagataattttataaatcatttgacctacctaattgctaaatgaataacatatggtggactgttattaagagtatttgttttaagtcattcaggaaaatctaaacttttttttccactaaggtatttactttaaggtagcttgaaatagcaatacaatttaaaaattaaaaactgaattttgtatctattttaagtaatatatgtaagacttgaaaataaatgttttatttcttatataaagtgttaaattaattgataccagatttcactggaacagtttcaactgataatttatgacaaaagaacatacctgtaatattgaaattaaaaagtgaaatttgtcataaagaatttcttttatttttgaaatcgagtttgtaaatgtccttttaagaagggagatatgaatccaataaataaactcaagtcttggctacctgga

SEQ ID NO: 22 - DNA, 5222 bp, Homo sapiens
ttctgcccgccgccgccgctgccgagcgccgcctttgttccctgcaggaagggcgagcgcgcgggccagcgctcagccagcgcctcacgacccttcgtcctccgctaagctccaacgctctgctcgactagccgcgcgccttccggggctccgcagacccgcgagatggcaccaaggaggaacaacgggcagtgctggtgtctgctgatgctgctctcggtctccacgcccctccctgctgtcacccagacccgcggtgcgacagagactgcttcccagggtcacctggacctcacgcagctcatcggtgtcccgctgccctcgtccgtatcctttgtcacaggctatggtggcttcccggcctacagtttcgggcctggtgccaatgttggccgcccagccaggactctcatcccatccaccttcttcagggacttcgccatcagggtcgtggtgaagcccagcagcacccgtggtggcgtgctcttcgccatcactgacgccttccagaaggtcatctacctgggcctgcggctctcaggtgtggaggacggccaccagcggatcatcctctactacacggagccaggctcccatgtgtcccaagaagctgctgccttctcggtgcctgtgatgacccacaggtggaaccgcttcgccatgattgtccagggtgaggaagtgaccctcctcgtgaactgtgaggagcacagccgcatccccttccagcggtcctcccaggctttggcttttgagtccagcgctggaatcttcatgggcaatgcaggagctacagggctcgagagattcactggctccctccagcagctcaccgtgcaccccgaccccaggactcccgaggagctgtgtgaccctgaagagtcctcggcatctggagagaccagtgggctgcaggaggcagacggagtagctgagatcttagaagccgtcacctacactcaagcctcgcccaaagaagcaaaagttgaacccataaacacacctccaactccatcctccccctttgaagacatggaactttctggtgaacctgtacccgaggggaccctggaaaccaccaacatgagcatcatccagcacagcagccccaaacaagggtctggtgagatcctgaatgacacactggagggggttcattctgtggatggtgaccccattactgacagcggctcaggggctggggccttccttgacattgctgaagaaaagaatttagcagcaacagcagcggggctggccgaggtgcccatcagcactgctggagaagcagaggccagcagtgtgcccaccgggggaccaaccctctctatgtccacggagaacccagaggaaggggtcactccaggtccagataatgaagagcgtttacgagcaacagcagcaggggaggccgaggcactcgccagcatgcctggggaagtggaggccagtggtgtggcccccggggagctggacctctccatgtccgcccagagcctcggggaagaggccactgtgggtccaagcagtgaagacagtttaacaacagctgcagctgcaaccgaagtgtccctcagtacttttgaggatgaggaagccagtggggtccccacagatggcctggctcccctcacagccaccatggcccctgagcgggcagtcacttctggtcctggtgatgaagaagacttggcagcagccacaacagaggagcccctcatcacagctgggggtgaagagtccggcagccctccccctgatgggccaccgctgcccctgcccacagtggctcctgaaagatggatcactccagctcaaagagaacatgtgggaatgaaaggacaggctgggcccaaaggagaaaagggtgatgctggggaggagcttcctggccctcctgaaccttctgggcctgttggacccacggcaggagcagaagcagagggctctggcctaggctggggctcggacgtcggctctggctctggtgacctggtgggcagtgagcagctgctgagaggtcctccaggacccccagggccacctggcttacctgggattccaggaaaaccaggaactgatgttttcatgggaccccctggatctcctggagaggatggacctgctggtgaacctgggcccccgggccctgagggacagcctggagttgatggagccaccggccttcccgggatgaaaggggagaagggagcaagagggcctaatggctcagttggtgaaaagggtgaccctggcaacagaggcttacctggacccccggggaaaaagggacaagctggccctcctggggtcatgggacccccagggcctcctggaccccctgggcccccaggccctggatgcacaatgggacttggattcgaggataccgaaggctctggaagcacccagctattgaatgaacccaaactctccagaccaacggctgcaattggtctcaaaggagagaaaggagaccggggacccaagggagaaagggggatggatggagccagtattgtgggaccccctgggccgagagggccacctgggcacatcaaggtcttgtctaattccttgatcaatatcacccatggattcatgaatttctcggacattcctgagctggtggggcctccggggccggacgggttgcctgggctgccaggatttccaggtcctagaggaccaaaaggtgacactggtttacctggctttccaggactaaaaggagaacagggcgagaagggagagccgggtgccatcctgacagaggacattcctctggaaaggctgatggggaaaaagggtgaacctggaatgcatggagccccaggaccaatggggcccaaaggaccaccaggacataaaggagaatttggccttcccgggcgacctggtcgcccaggactgaatggcctcaagggtaccaaaggagatccaggggtcattatgcagggcccacctggcttacctggccctccaggcccccctgggccacctggagctgtgattaacatcaaaggagccattttcccaatacccgtccgaccacactgcaaaatgccagttgatactgctcatcctgggagtccagagctcatcacttttcacggtgttaaaggagagaaaggatcctggggtcttcctggctcaaagggagaaaaaggcgaccagggagcccagggaccaccaggtcctccacttgatctagcttacctgagacactttctgaacaacttgaagggggagaatggagacaaggggttcaaaggtgaaaaaggagaaaaaggagacattaatggcagcttccttatgtctgggcctccaggcctgcccggaaatccaggcccggctggccaaaaaggggagacagtcgttgggccccaaggacccccaggtgctcctggtctgcctgggccacctggctttggaagacctggtgatcctgggccaccggggcccccggggccaccaggacctccagctatcctgggagcagctgtggcccttccaggtccccctggccctccaggacagccagggcttcccggatccagaaacctggtcacagcattcagcaacatggatgacatgctgcagaaagcgcatttggttatagaaggaacattcatctacctgagggacagcactgagtttttcattcgtgttagagatggctggaaaaaattacagctgggagaactgatccccattcctgccgacagccctccaccccctgcgctttccagcaacccacatcagcttctgcctccaccaaaccctatttcaagtgccaattatgagaagcctgctctgcatttggctgctctgaacatgccattttctggggacattcgagctgattttcagtgcttcaagcaggccagagctgcaggactgttgtccacctaccgagcattcttatcttcccatttgcaagatctgtccaccattgtgaggaaagcagagagatacagccttcccatagtgaacctcaagggccaagtactttttaataattgggactcaattttttctggccacggaggtcagttcaatatgcatattccaatatactcctttgatggtcgagacataatgacagatccttcttggccccagaaagtcatttggcatggctccagcccccatggcgtccgccttgtggataactactgtgaagcatggcgaaccgcggacacagcggtcacgggacttgcctccccgctgagcacggggaagattctggaccagaaagcatacagctgtgctaatcggctaattgtcctatgtatcgaaaacagtttcatgacagacgctaggaagtaatggccttctgatgattcttaaagagttttcaattttttcttatgtgaagagttgacactgaaatctaaaatgtttaattgttgtaaatattacagtttttttttttttactacatattctttacaacagcaaccaaagaaaacatacctcaatacactcaaaactgaagacatagaggactcagatcaaagacaaaatctgatccatatattggtgctagattctgcaggaaaccccagcagtgtgaacgcatcccaacataggttaagagcaagttgaaaacaaaggccagattctgccactgcatccttcagacagttatatcctccttttaaaccattgttgttgagtgtaagatgtccttcatgttttcttataaagtcagtgtttagaaatgttaccctttctaagttatatacagatcaaatgcttttttctttcacgtacatccatcatttgcaactgctgttcgtacacagaaacaggactgctcaaatgatcctatttgtattttctgatgctatcagactctaatgtttttttccctaaaatattattgccatcatgctttaggaatttttatatttttacacaatcatattttagtatggtgtctgtttatgtaactctgacttgctggaaaagttgaaactccaaataatctgaaactagaaaagaaatagcacataattactaccttccccttggcggctctcctcccccaacccccaccccacaattttatgacttccatttggcaattgttgaattataactgcgactgaaacaaacaggttcatagagatgaattttctgagaaacatatatctacatgttgtataattggattttttttccatgtaagtgaacataaaaacatcttttccggg

SEQ ID NO: 23 - DNA, 6366 bp, Homo sapiens
ggggctggccgaggctgcggcgtttctccccaaggaagtgtcttctccgctttccctgttcttctgtttctcacacactttctatctcattctgtaactttcaagcctttccttctaactgtatgtatttagttacttgttttcaagctggttccctctctggccccctggcctggggaaagcctccacacttactgcgggtcttgtttagagtctgagtttgtgagattatttggggcagagtgggcgagtggctgacaggtgacccccaggaggaggattcctggggctggtgtcttctcccagctgctgcttccagtgggcctgggcccaggactggacctccgctggcacccctgagtgcctccctgccaggccatgctgctgtagaccctaacagcgtctcttcctggccaagagaagcctgtccccaagaacaggagagccatggccggcctccgagggaacgctgtggctggcctcctctggatgctgctgctgtggagtgggggcggcggctgccaggctcagcgggcaggttgcaaaagtgtccactacgatctggtcttcctcctggacacctcctccagcgtgggcaaggaggactttgagaaggtccggcagtgggtggccaacctggtggacaccttcgaggtgggccccgaccgcacccgtgtgggggtcgtgcgctacagcgaccggcccaccacggccttcgagttgggactctttggctcgcaggaggaggtcaaggcggctgcccggcgtctcgcctaccacgggggcaacaccaacacgggagacgcgctccgctacatcacggcccgcagcttctccccacacgccggcggccgccccagggaccgcgcctacaagcaggtggccatcctgctcaccgacggccgcagccaggacctggtgctggacgccgcggcggcagcccaccgcgctggcatccgcatctttgccgtgggcgtgggcgaggcactcaaggaggagctggaggagatcgcctcagagcccaagtccgcccacgtcttccacgtgtccgacttcaatgccatcgacaagatccggggcaagctgcggcgccgtctttgtgaaaatgtgctctgtcctagcgttcgtgtagaaggagatcgctttaagcacaccaatggaggaaccaaggaaatcacaggttttgacctgatggatttgttcagtgtgaaggaaatcttggggaagagagagaatggagctcagagttcctatgtacggatgggatccttccctgtggtgcaaagtactgaggatgtgttcccccaaggtttacctgatgagtacgcctttgtcacaaccttccggttcaggaaaacctctcggaaggaagactggtatatctggcaggtcatcgaccagtacagcatcccacaggtctccatccggctggatggtgaaaacaaggcagtcgagtacaacgctgtgggtgccatgaaagatgctgtcagggtggtcttccgaggttctcgggtcaatgacctctttgaccgggactggcacaagatggccctgagcatccaggcccagaacgtctccctgcacattgactgtgcgctggtgcagacactacccatcgaggaacgggagaacattgacatccagggcaagactgtgattggcaagcgcctctacgacagtgtgcccattgactttgacctacagcggattgtgatctattgtgactcgagacacgcagaattggagacttgttgtgatatcccctcgggtccgtgccaggtgaccgtggtgacagagcctccacctccacccccaccccagcggcctcccaccccaggcagtgaacagattgggtttttgaagaccatcaactgctcctgcccagctggagagaagggtgaaatgggagttgctggccccatggggctccctggtccaaagggagacataggagccattgggccggttggcgctcctggacctaagggagagaaaggtgatgtgggcataggaccttttggccaaggggaaaagggtgaaaagggttccctgggcctgcccggcccccctgggagagacggcagcaaaggcatgagaggggagccaggagagctgggagagccggggctgccgggtgaggtcggcatgcgggggccccaaggaccacctggactccccggacctcctggacgtgtcggagctcctggtctccaaggagaacgaggtgaaaagggaactcgaggagaaaagggagagcgaggcctggatggattccctgggaagcctggggacacaggacagcagggcaggcccggcccttctggtgtggcaggaccccagggagaaaagggtgacgtgggacctgcggggccacctggtgtaccaggctcagtggtgcagcaagagggcttgaaaggggaacagggagctccaggacccagaggtcaccaaggcgcccccggtcctccaggagctcggggtccaataggcccagaaggcagggatggacctcctggtttgcaaggtctccgagggaagaaaggtgacatgggaccacctggaatccctggattgctggggctgcagggccctccaggaccccctggtgtcccaggcccccctggaccgggaggttctccgggtttgcctggagagatcggcttcccgggaaagcctggacctcctgggcccacgggaccccctggaaaggacgggccaaatggaccaccaggtccgccaggaaccaagggagaaccaggagaaagaggggaagatggtctgcctggaaaaccaggccttcggggagaaattggggagcagggcctggcaggccgacctggagagaagggagaagcaggcctcccaggggctccaggcttcccaggtgtgagaggagagaaaggagaccagggagaaaaaggtgaactgggacttccaggactgaaaggtgaccgaggtgaaaagggtgaagctggtcctgcaggccctcccgggttacctggaactacatccctgttcacaccacatccacggatgcccggagaacaagggcccaaaggagagaagggcgatccaggcctgcctggggaaccgggactgcagggccgtcctggagaattggggcctcagggacccactggaccaccgggtgccaagggacaggaaggtgcacatggggctcctggagcagctggaaaccccggtgctcccggacatgtcggtgcccccggtcccagtggccctccaggaagtgtgggtgctcccggcctcagaggcaccccagggaaagatggggagcgtggtgagaagggtgcagcgggggaagaaggcagcccagggccagttggtcccaggggagatcctggtgctcctgggctccctgggccgcccggaaaagggaaggatggagagccgggactccgtggatcacctggactccctggacccctaggaaccaaggctgcttgcggaaaagtcagagggtcagaaaactgtgcactgggagggcaatgtgttaagggggatcgaggagctcctgggatccctggttctcctggcagccgtggtgacccaggcattggggttgctggccctcctggcccttccggaccaccaggagacaaaggatccccgggatcacgaggcttacctggattccctggcccccagggcccagccggccgggacggtgcaccaggaaatccaggagaaagagggcctcctggcaagccgggcctctcttcactactgtctccaggggacataaatctcttggctaaggatgtgtgcaatgactgccctcctggccccccaggcctccctggtctaccaggttttaaaggggacaaaggtgtcccaggaaagccagggagagaaggcacagaagggaaaaagggagaggctgggcctccaggcctaccagggcccccaggaatagctggaccacagggaagtcaaggagaacgtggtgcagatggtgaggttgggcagaaaggtgatcagggtcatcctggagttccaggtttcatggggcccccagggaaccccgggccaccaggggcagatggaattgcaggagctgctggaccaccaggaatccaagggtcacctgggaaagaaggccctcctggcccccaaggcccatctggattacccggaatcccaggagaagaaggcaaagagggcagagatggaaagccgggtccccctggagagccgggcaaagcaggagagccaggtctaccaggaccagagggtgcccgaggcccacctggcttcaagggacacacaggcgattctggtgcacccggtccccggggagagtctggtgccatggggcttcctggtcaggaagggttaccaggaaaagatggtgacactggacccactgggccacagggtccccaaggaccaaggggcccaccgggcaagaatggatcaccgggatctccaggagagcctggcccttcaggaacccctggccagaaaggaagcaaaggggaaaatggcagcccaggacttcctggcttcctgggtccccgtgggcctccgggagaaccaggagagaaaggagtcccaggcaaggagggggtccctgggaagcctggagagcctggattcaaaggagaaaggggagatcctgggatcaaaggtgacaaaggacctcctggtggaaaaggccagcctggggaccctggaatcccaggccacaaaggccacacaggcctgatgggtccccaaggactacctggggagaatggaccagttggacccccagggcctccaggccagccgggatttccaggactgaggggggagtctccatccatggaaaccctgcgtcggcttattcaagaagagctggggaagcagcttgaaaccagactcgcctacctcctggcccagatgcccccggcgtacatgaagtcatctcaaggcagacctgggcccccagggccccctggaaaagatgggcttccaggccgggccggccccatgggggagccaggtcgtcctgggcaggggggtctggaaggaccctctggacccataggtcccaaaggtgagcgaggagccaaaggtgacccaggtgcacctggagttggcctccgaggcgagatgggaccccctggaatcccaggtcaacccggggaacctggctatgctaaagatggacttcctgggatccctggccctcaaggggagacaggaccagctggacatcctggcctcccaggacctcccggtcccccaggccaatgtgacccttcccagtgtgcctacttcgccagccttgctgcccggccgggtaatgtgaagggtccctaaaggactctggaaagccagaagactgcagtggatttctgaaacttgaactcagagcccagtgggaagccagaggtcttgaaagacttcagccatgtgttccttttttttttctttcttttatcgtttgctttttgttttattttcttgagagacctcaaaattattaaatccaacagacgctgccggtcggtcagattattattaatattattgttgttgttaattattattattatttcatatgctgatgctttgtgagttcttttccactcctttaaagttgggaaaacttgattcgtggggcaggagattgtttcttcattcttctgacagcccccatctgacgcgtaactgcccattttaaggaaactcttggtgctacaaaaccctgaccagacacttggcaaatttacctctttcttcaaaagaaaaactttaagaaaatgagccaatgggcttcattctcagtcatgcccggagatcacccaggagaaataatacaaacaccaccactgtccagagagagtaaagaagcagaaagagaaagaatttgcaaccatgaggaatgttcccacctcccgacgggacgtgcatttggaaaacacagaatcagccctcagggtgcactccagccacctcagtgctctaagctcacagaagtgaaataatgtctgtgggttggcaatggctttgtgggatcatatgtcttggccaaagatgggaaaacctatgttgaagaggcagcccttgagtgttaatttgtcttctaaactgtgtaaggccccttcaagttcctcttgttggtttcaattatattaattataaaacaagtggatgtggtgaccatccacttgtgtttccctaatgatgggcagttggccagggcactgaccagagctgggaaatttgtatctccaaggcggctctgtctctgaaataaatggcatcaagtgcatgtgtgtatgcgacatgccctgcctgaacaggtgctcaataaatccaagtttccttctcttgaaaaaaaaaaaaaaaaaaaaa

SEQ ID NO: 24 - DNA, 11185 bp, Homo sapiens
gctgccccgagcctttctggggaagaactccaggcgtgcggacgcaacagccgagaacattaggtgttgtggacaggagctgggaccaagatcttcggccagccccgcatcctcccgcatcttccagcaccgtcccgcaccctccgcatccttccccgggccaccacgcttcctatgtgacccgcctgggcaacgccgaacccagtcgcgcagcgctgcagtgaattttccccccaaactgcaataagccgccttccaaggccaagatgttcataaatataaagagcatcttatggatgtgttcaaccttaatagtaacccatgcgctacataaagtcaaagtgggaaaaagcccaccggtgaggggctccctctctggaaaagtcagcctaccttgtcatttttcaacgatgcctactttgccacccagttacaacaccagtgaatttctccgcatcaaatggtctaagattgaagtggacaaaaatggaaaagatttgaaagagactactgtccttgtggcccaaaatggaaatatcaagattggtcaggactacaaagggagagtgtctgtgcccacacatcccgaggctgtgggcgatgcctccctcactgtggtcaagctgctggcaagtgatgcgggtctttaccgctgtgacgtcatgtacgggattgaagacacacaagacacggtgtcactgactgtggatggggttgtgtttcactacagggcggcaaccagcaggtacacactgaattttgaggctgctcagaaggcttgtttggacgttggggcagtcatagcaactccagagcagctctttgctgcctatgaagatggatttgagcagtgtgacgcaggctggctggctgatcagactgtcagatatcccatccgggctcccagagtaggctgttatggagataagatgggaaaggcaggagtcaggacttatggattccgttctccccaggaaacttacgatgtgtattgttatgtggatcatctggatggtgatgtgttccacctcactgtccccagtaaattcaccttcgaggaggctgcaaaagagtgtgaaaaccaggatgccaggctggcaacagtgggggaactccaggcggcatggaggaacggctttgaccagtgcgattacgggtggctgtcggatgccagcgtgcgccaccctgtgactgtggccagggcccagtgtggaggtggtctacttggggtgagaaccctgtatcgttttgagaaccagacaggcttccctccccctgatagcagatttgatgcctactgctttaaacctaaagaggctacaaccatcgatttgagtatcctcgcagaaactgcatcacccagtttatccaaagaaccacaaatggtttctgatagaactacaccaatcatccctttagttgatgaattacctgtcattccaacagagttccctcccgtgggaaatattgtcagttttgaacagaaagccacagtccaacctcaggctatcacagatagtttagccaccaaattacccacacctactggcagtaccaagaagccctgggatatggatgactactcaccttctgcttcaggacctcttggaaagctagacatatcagaaattaaggaagaagtgctccagagtacaactggcgtctctcattatgctacggattcatgggatggtgtcgtggaagataaacaaacacaagaatcggttacacagattgaacaaatagaagtgggtcctttggtaacatctatggaaatcttaaagcacattccttccaaggaattccctgtaactgaaacaccattggtaactgcaagaatgatcctggaatccaaaactgaaaagaaaatggtaagcactgtttctgaattggtaaccacaggtcactatggattcaccttgggagaagaggatgatgaagacagaacacttacagttggatctgatgagagcaccttgatctttgaccaaattcctgaagtcattacggtgtcaaagacttcagaagacaccatccacactcatttagaagacttggagtcagtctcagcatccacaactgtttcccctttaattatgcctgataataatggatcatccatggatgactgggaagagagacaaactagtggtaggataacggaagagtttcttggcaaatatctgtctactacaccttttccatcacagcatcgtacagaaatagaattgtttccttattctggtgataaaatattagtagagggaatttccacagttatttatccttctctacaaacagaaatgacacatagaagagaaagaacagaaacactaataccagagatgagaacagatacttatacagatgaaatacaagaagagatcactaaaagtccatttatgggaaaaacagaagaagaagtcttctctgggatgaaactctctacatctctctcagagccaattcatgttacagagtcttctgtggaaatgaccaagtcttttgatttcccaacattgataacaaagttaagtgcagagccaacagaagtaagagatatggaggaagactttacagcaactccaggtactacaaaatatgatgaaaatattacaacagtgcttttggcccatggtactttaagtgttgaagcagccactgtatcaaaatggtcatgggatgaagataatacaacatccaagcctttagagtctacagaaccttcagcctcttcaaaattgccccctgccttactcacaactgtggggatgaatggaaaggataaagacatcccaagtttcactgaagatggagcagatgaatttactcttattccagatagtactcaaaagcagttagaggaggttactgatgaagacatagcagcccatggaaaattcacaattagatttcagccaactacatcaactggtattgcagaaaagtcaactttgagagattctacaactgaagaaaaagttccacctatcacaagcactgaaggccaagtttatgcaaccatggaaggaagtgctttgggtgaagtagaagatgtggacctctctaagccagtatctactgttccccaatttgcacacacttcagaggtggaaggattagcatttgttagttatagtagcacccaagagcctactacttatgtagactcttcccataccattcctctttctgtaattcccaagacagactggggagtgttagtaccttctgttccatcagaagatgaagttctaggtgaaccctctcaagacatacttgtcattgatcagactcgccttgaagcgactatttctccagaaactatgagaacaacaaaaatcacagagggaacaactcaggaagaattcccttggaaagaacagactgcagagaaaccagttcctgctctcagttctacagcttggactcccaaggaggcagtaacaccactggatgaacaagagggcgatggatcagcatatacagtctctgaagatgaattgttgacaggttctgagagggtcccagttttagaaacaactccagttggaaaaattgatcacagtgtgtcttatccaccaggtgctgtaactgagcacaaagtgaaaacagatgaagtggtaacactaacaccacgcattgggccaaaagtatctttaagtccagggcctgaacaaaaatatgaaacagaaggtagtagtacaacaggatttacatcatctttgagtccttttagtacccacattacccagcttatggaagaaaccactactgagaaaacatccctagaggatattgatttaggctcaggattatttgaaaagcccaaagccacagaactcatagaattttcaacaatcaaagtcacagttccaagtgatattaccactgccttcagttcagtagacagacttcacacaacttcagcattcaagccatcttccgcgatcactaagaaaccacctctcatcgacagggaacctggtgaagaaacaaccagtgacatggtaatcattggagaatcaacatctcatgttcctcccactacccttgaagatattgtagccaaggaaacagaaaccgatattgatagagagtatttcacgacttcaagtcctcctgctacacagccaacaagaccacccactgtggaagacaaagaggcctttggacctcaggcgctttctacgccacagcccccagcaagcacaaaatttcaccctgacattaatgtttatattattgaggtcagagaaaataagacaggtcgaatgagtgatttgagtgtaattggtcatccaatagattcagaatctaaagaagatgaaccttgtagtgaagaaacagatccagtgcatgatctaatggctgaaattttacctgaattccctgacataattgaaatagacctataccacagtgaagaaaatgaagaagaagaagaagagtgtgcaaatgctactgatgtgacaaccaccccatctgtgcagtacataaatgggaagcatctcgttaccactgtgcccaaggacccagaagctgcagaagctaggcgtggccagtttgaaagtgttgcaccttctcagaatttctcggacagctctgaaagtgatactcatccatttgtaatagccaaaacggaattgtctactgctgtgcaacctaatgaatctacagaaacaactgagtctcttgaagttacatggaagcctgagacttaccctgaaacatcagaacatttttcaggtggtgagcctgatgttttccccacagtcccattccatgaggaatttgaaagtggaacagccaaaaaaggggcagaatcagtcacagagagagatactgaagttggtcatcaggcacatgaacatactgaacctgtatctctgtttcctgaagagtcttcaggagagattgccattgaccaagaatctcagaaaatagcctttgcaagggctacagaagtaacatttggtgaagaggtagaaaaaagtacttctgtcacatacactcccactatagttccaagttctgcatcagcatatgtttcagaggaagaagcagttaccctaataggaaatccttggccagatgacctgttgtctaccaaagaaagctgggtagaagcaactcctagacaagttgtagagctctcagggagttcttcgattccaattacagaaggctctggagaagcagaagaagatgaagatacaatgttcaccatggtaactgatttatcacagagaaatactactgatacactcattactttagacactagcaggataatcacagaaagcttttttgaggttcctgcaaccaccatttatccagtttctgaacaaccttctgcaaaagtggtgcctaccaagtttgtaagtgaaacagacacttctgagtggatttccagtaccactgttgaggaaaagaaaaggaaggaggaggagggaactacaggtacggcttctacatttgaggtatattcatctacacagagatcggatcaattaattttaccctttgaattagaaagtccaaatgtagctacatctagtgattcaggtaccaggaaaagttttatgtccttgacaacaccaacacagtctgaaagggaaatgacagattctactcctgtctttacagaaacaaatacattagaaaatttgggggcacagaccactgagcacagcagtatccatcaacctggggttcaggaagggctgaccactctcccacgtagtcctgcctctgtctttatggagcagggctctggagaagctgctgccgacccagaaaccaccactgtttcttcattttcattaaacgtagagtatgcaattcaagccgaaaaggaagtagctggcactttgtctccgcatgtggaaactacattctccactgagccaacaggactggttttgagtacagtaatggacagagtagttgctgaaaatataacccaaacatccagggaaatagtgatttcagagcgattaggagaaccaaattatggggcagaaataaggggcttttccacaggttttcctttggaggaagatttcagtggtgactttagagaatactcaacagtgtctcatcccatagcaaaagaagaaacggtaatgatggaaggctctggagatgcagcatttagggacacccagacttcaccatctacagtacctacttcagttcacatcagtcacatatctgactcagaaggacccagtagcaccatggtcagcacttcagccttcccctgggaagagtttacatcctcagctgagggctcaggtgagcaactggtcacagtcagcagctctgttgttccagtgcttcccagtgctgtgcaaaagttttctggtacagcttcctccattatcgacgaaggattgggagaagtgggtactgtcaatgaaattgatagaagatccaccattttaccaacagcagaagtggaaggtacgaaagctccagtagagaaggaggaagtaaaggtcagtggcacagtttcaacaaactttccccaaactatagagccagccaaattatggtctaggcaagaagtcaaccctgtaagacaagaaattgaaagtgaaacaacatcagaggaacaaattcaagaagaaaagtcatttgaatcccctcaaaactctcctgcaacagaacaaacaatctttgattcacagacatttactgaaactgaactcaaaaccacagattattctgtactaacaacaaagaaaacttacagtgatgataaagaaatgaaggaggaagacacttctttagttaacatgtctactccagatccagatgcaaatggcttggaatcttacacaactctccctgaagctactgaaaagtcacattttttcttagctactgcattagtaactgaatctataccagctgaacatgtagtcacagattcaccaatcaaaaaggaagaaagtacaaaacattttccgaaaggcatgagaccaacaattcaagagtcagatactgagctcttattctctggactgggatcaggagaagaagttttacctactctaccaacagagtcagtgaattttactgaagtggaacaaatcaataacacattatatccccacacttctcaagtggaaagtacctcaagtgacaaaattgaagactttaacagaatggaaaatgtggcaaaagaagttggaccactcgtatctcaaacagacatctttgaaggtagtgggtcagtaaccagcacaacattaatagaaattttaagtgacactggagcagaaggacccacggtggcacctctccctttctccacggacatcggacatcctcaaaatcagactgtcaggtgggcagaagaaatccagactagtagaccacaaaccataactgaacaagactctaacaagaattcttcaacagcagaaattaacgaaacaacaacctcatctactgattttctggctagagcttatggttttgaaatggccaaagaatttgttacatcagcaccaaaaccatctgacttgtattatgaaccttctggagaaggatctggagaagtggatattgttgattcatttcacacttctgcaactactcaggcaaccagacaagaaagcagcaccacatttgtttctgatgggtccctggaaaaacatcctgaggtgccaagcgctaaagctgttactgctgatggattcccaacagtttcagtgatgctgcctcttcattcagagcagaacaaaagctcccctgatccaactagcacactgtcaaatacagtgtcatatgagaggtccacagacggtagtttccaagaccgtttcagggaattcgaggattccaccttaaaacctaacagaaaaaaacccactgaaaatattatcatagacctggacaaagaggacaaggatttaatattgacaattacagagagtaccatccttgaaattctacctgagctgacatcggataaaaatactatcatagatattgatcatactaaacctgtgtatgaagacattcttggaatgcaaacagatatagatacagaggtaccatcagaaccacatgacagtaatgatgaaagtaatgatgacagcactcaagttcaagagatctatgaggcagctgtcaacctttctttaactgaggaaacatttgagggctctgctgatgttctggctagctacactcaggcaacacatgatgaatcaatgacttatgaagatagaagccaactagatcacatgggctttcacttcacaactgggatccctgctcctagcacagaaacagaattagacgttttacttcccacggcaacatccctgccaattcctcgtaagtctgccacagttattccagagattgaaggaataaaagctgaagcaaaagccctggatgacatgtttgaatcaagcactttgtctgatggtcaagctattgcagaccaaagtgaaataataccaacattgggccaatttgaaaggactcaggaggagtatgaagacaaaaaacatgctggtccttcttttcagccagaattctcttcaggagctgaggaggcattagtagaccatactccctatctaagtattgctactacccaccttatggatcagagtgtaacagaggtgcctgatgtgatggaaggatccaatcccccatattacactgatacaacattagcagtttcaacatttgcgaagttgtcttctcagacaccatcatctcccctcactatctactcaggcagtgaagcctctggacacacagagatcccccagcccagtgctctgccaggaatagacgtcggctcatctgtaatgtccccacaggattcttttaaggaaattcatgtaaatattgaagcaactttcaaaccatcaagtgaggaataccttcacataactgagcctccctctttatctcctgacacaaaattagaaccttcagaagatgatggtaaacctgagttattagaagaaatggaagcttctcccacagaacttattgctgtggaaggaactgagattctccaagatttccaaaacaaaaccgatggtcaagtttctggagaagcaatcaagatgtttcccaccattaaaacacctgaggctggaactgttattacaactgccgatgaaattgaattagaaggtgctacacagtggccacactctacttctgcttctgccacctatggggtcgaggcaggtgtggtgccttggctaagtccacagacttctgagaggcccacgctttcttcttctccagaaataaaccctgaaactcaagcagctttaatcagagggcaggattccacgatagcagcatcagaacagcaagtggcagcgagaattcttgattccaatgatcaggcaacagtaaaccctgtggaatttaatactgaggttgcaacaccaccattttcccttctggagacttctaatgaaacagatttcctgattggcattaatgaagagtcagtggaaggcacggcaatctatttaccaggacctgatcgctgcaaaatgaacccgtgccttaacggaggcacctgttatcctactgaaacttcctacgtatgcacctgtgtgccaggatacagcggagaccagtgtgaacttgattttgatgaatgtcactctaatccctgtcgtaatggagccacttgtgttgatggttttaacacattcaggtgcctctgccttccaagttatgttggtgcactttgtgagcaagataccgagacatgtgactatggctggcacaaattccaagggcagtgctacaaatactttgcccatcgacgcacatgggatgcagctgaacgggaatgccgtctgcagggtgcccatctcacaagcatcctgtctcacgaagaacaaatgtttgttaatcgtgtgggccatgattatcagtggataggcctcaatgacaagatgtttgagcatgacttccgttggactgatggcagcacactgcaatacgagaattggagacccaaccagccagacagcttcttttctgctggagaagactgtgttgtaatcatttggcatgagaatggccagtggaatgatgttccctgcaattaccatctcacctatacgtgcaagaaaggaacagttgcttgcggccagccccctgttgtagaaaatgccaagacctttggaaagatgaaacctcgttatgaaatcaactccctgattagataccactgcaaagatggtttcattcaacgtcaccttccaactatccggtgcttaggaaatggaagatgggctatacctaaaattacctgcatgaacccatctgcataccaaaggacttattctatgaaatactttaaaaattcctcatcagcaaaggacaattcaataaatacatccaaacatgatcatcgttggagccggaggtggcaggagtcgaggcgctgatccctaaaatggcgaacatgtgttttcatcatttcagccaaagtcctaacttcctgtgcctttcctatcacctcgagaagtaattatcagttggtttggatttttggaccaccgttcagtcattttgggttgccgtgctcccaaaacattttaaatgaaagtattggcattcaaaaagacagcagacaaaatgaaagaaaatgagagcagaaagtaagcatttccagcctatctaatttctttagttttctatttgcctccagtgcagtccatttcctaatgtataccagcctactgtactatttaaaatgctcaatttcagcaccgatggccatgtaaataagatgatttaatgttgattttaatcctgtatataaaataaaaagtcacaatgagtttgggcatatttaatgatgattatggagccttagaggtctttaatcattggttcggctgcttttatgtagtttaggctggaaatggtttcacttgctctttgactgtcagcaagactgaagatggcttttcctggacagctagaaaacacaaaatcttgtaggtcattgcacctatctcagccataggtgcagtttgcttctacatgatgctaaaggctgcgaatgggatcctgatggaactaaggactccaatgtcgaactcttctttgctgcattcctttttcttcacttacaagaaaggcctgaatggaggacttttctgtaaccagg

SEQ ID NO: 25 - DNA, 389 bp, Homo sapiens
ctccaaaggagccagcgtctccccagttcctgaaatcctgggtgttgcctgccagtcgccatgagaacttcctaccttctgctgtttactctctgcttacttttgtctgagatggcctcaggtggtaactttctcacaggccttggccacagatctgatcattacaattgcgtcagcagtggagggcaatgtctctattctgcctgcccgatctttaccaaaattcaaggcacctgttacagagggaaggccaagtgctgcaagtgagctgggagtgaccagaagaaatgacgcagaagtgaaatgaactttttataagcattcttttaataaaggaaaattgcttttgaagtataaaaaaaaaaaaaaaaaaaaaaaaaaaaaaaaaa

SEQ ID NO: 26 - DNA, 3450 bp, Homo sapiens
ggcgcggagcggtgcggcggcgggaggcggaggcgagggtgcgatggcgcggagcccgggacgcgcgtacgccctgctgcttctcctgatctgctttaacgttggaagtggacttcacttacaggtcttaagcacaagaaatgaaaataagctgcttcctaaacatcctcatttagtgcggcaaaagcgcgcctggatcaccgcccccgtggctcttcgggagggagaggatctgtccaagaagaatccaattgccaagatacattctgatcttgcagaagaaagaggactcaaaattacttacaaatacactggaaaagggattacagagccaccttttggtatatttgtctttaacaaagatactggagaactgaatgttaccagcattcttgatcgagaagaaacaccattttttctgctaacaggttacgctttggatgcaagaggaaacaatgtagagaaacccttagagctacgcattaaggttcttgatatcaatgacaacgaaccagtgttcacacaggatgtctttgttgggtctgttgaagagttgagtgcagcacatactcttgtgatgaaaatcaatgcaacagatgcagatgagcccaataccctgaattcgaaaatttcctatagaatcgtatctctggagcctgcttatcctccagtgttctacctaaataaagatacaggagagatttatacaaccagtgttaccttggacagagaggaacacagcagctacactttgacagtagaagcaagagatggcaatggagaagttacagacaaacctgtaaaacaagctcaagttcagattcgtattttggatgtcaatgacaatatacctgtagtagaaaataaagtgcttgaagggatggttgaagaaaatcaagtcaacgtagaagttacgcgcataaaagtgttcgatgcagatgaaataggttctgataattggctggcaaattttacatttgcatcaggaaatgaaggaggttatttccacatagaaacagatgctcaaactaacgaaggaattgtgacccttattaaggaagtagattatgaagaaatgaagaatcttgacttcagtgttattgtcgctaataaagcagcttttcacaagtcgattaggagtaaatacaagcctacacccattcccatcaaggtcaaagtgaaaaatgtgaaagaaggcattcattttaaaagcagcgtcatctcaatttatgttagcgagagcatggatagatcaagcaaaggccaaataattggaaattttcaagcttttgatgaggacactggactaccagcccatgcaagatatgtaaaattagaagatagagataattggatctctgtggattctgtcacatctgaaattaaacttgcaaaacttcctgattttgaatctagatatgttcaaaatggcacatacactgtaaagattgtggccatatcagaagattatcctagaaaaaccatcactggcacagtccttatcaatgttgaagacatcaacgacaactgtcccacactgatagagcctgtgcagacaatctgtcacgatgcagagtatgtgaatgttactgcagaggacctggatggacacccaaacagtggccctttcagtttctccgtcattgacaaaccacctggcatggcagaaaaatggaaaatagcacgccaagaaagtaccagtgtgctgctgcaacaaagtgagaaaaagcttgggagaagtgaaattcagttcctgatttcagacaatcagggttttagttgtcctgaaaagcaggtccttacactcacagtttgtgagtgtctgcatggcagcggctgcagggaagcacagcatgactcctatgtgggcctgggacccgcagcaattgcgctcatgattttggcctttctgctcctgctattggtaccacttttactgctgatgtgccattgcggaaagggcgccaaaggctttacccccatacctggcaccatagagatgctgcatccttggaataatgaaggagcaccacctgaagacaaggtggtgccatcatttctgccagtggatcaagggggcagtctagtaggaagaaatggagtaggaggtatggccaaggaagccacgatgaaaggaagtagctctgcttccattgtcaaagggcaacatgagatgtccgagatggatggaaggtgggaagaacacagaagcctgctttctggtagagctacccagtttacaggggccacaggcgctatcatgaccactgaaaccacgaagaccgcaagggccacaggggcttccagagacatggccggagctcaggcagctgctgttgcactgaacgaagaattcttaagaaattatttcactgataaagcggcctcttacactgaggaagatgaaaatcacacagccaaagattgccttctggtttattctcaggaagaaactgaatcgctgaatgcttctattggttgttgcagttttattgaaggagagctagatgaccgcttcttagatgatttgggacttaaattcaagacactagctgaagtttgcctgggtcaaaaaatagatataaataaggaaattgagcagagacaaaaacctgccacagaaacaagtatgaacacagcttcacattcactctgtgagcaaactatggttaattcagagaatacctactcctctggcagtagcttcccagttccaaaatctttgcaagaagccaatgcagagaaagtaactcaggaaatagtcactgaaagatctgtgtcttctaggcaggcgcaaaaggtagctacacctcttcctgacccaatggcttctagaaatgtgatagcaacagaaacttcctatgtcacagggtccactatgccaccaaccactgtgatcctgggtcctagccagccacagagccttattgtgacagagagggtgtatgctccagcttctaccttggtagatcagccttatgctaatgaaggtacagttgtggtcactgaaagagtaatacagcctcatgggggtggatcgaatcctctggaaggcactcagcatcttcaagatgtaccttacgtcatggtgagggaaagagagagcttccttgcccccagctcaggtgtgcagcctactctggccatgcctaatatagcagtaggacagaatgtgacagtgacagaaagagttctagcacctgcttccactctgcaatccagttaccagattcccactgaaaattctatgacggctaggaacaccacggtgtctggagctggagtccctggccctctgccagattttggtttagaggaatctggtcattctaattctaccataaccacatcttccaccagagttaccaagcatagcactgtacagcattcttactcctaaacagcagtcagccacaaactgacccagagtttaattagcagtgactaatt

SEQ ID NO: 27 - DNA, 2398 bp, Homo sapiens
ccgcagaggagcctcggccaggctagccagggcgcccccagcccctccccaggccgcgagcgcccctgccgcggtgcctggcctcccctcccagactgcagggacagcacccggtaactgcgagtggagcggaggacccgagcggctgaggagagaggaggcggcggcttagctgctacggggtccggccggcgccctcccgaggggggctcaggaggaggaaggaggacccgtgcgagaatgcctctgccctggagccttgcgctcccgctgctgctctcctgggtggcaggtggtttcgggaacgcggccagtgcaaggcatcacgggttgttagcatcggcacgtcagcctggggtctgtcactatggaactaaactggcctgctgctacggctggagaagaaacagcaagggagtctgtgaagctacatgcgaacctggatgtaagtttggtgagtgcgtgggaccaaacaaatgcagatgctttccaggatacaccgggaaaacctgcagtcaagatgtgaatgagtgtggaatgaaaccccggccatgccaacacagatgtgtgaatacacacggaagctacaagtgcttttgcctcagtggccacatgctcatgccagatgctacgtgtgtgaactctaggacatgtgccatgataaactgtcagtacagctgtgaagacacagaagaagggccacagtgcctgtgtccatcctcaggactccgcctggccccaaatggaagagactgtctagatattgatgaatgtgcctctggtaaagtcatctgtccctacaatcgaagatgtgtgaacacatttggaagctactactgcaaatgtcacattggtttcgaactgcaatatatcagtggacgatatgactgtatagatataaatgaatgtactatggatagccatacgtgcagccaccatgccaattgcttcaatacccaagggtccttcaagtgtaaatgcaagcagggatataaaggcaatggacttcggtgttctgctatccctgaaaattctgtgaaggaagtcctcagagcacctggtaccatcaaagacagaatcaagaagttgcttgctcacaaaaacagcatgaaaaagaaggcaaaaattaaaaatgttaccccagaacccaccaggactcctacccctaaggtgaacttgcagcccttcaactatgaagagatagtttccagaggcgggaactctcatggaggtaaaaaagggaatgaagagaaaatgaaagaggggcttgaggatgagaaaagagaagagaaagccctgaagaatgacatagaggagcgaagcctgcgaggagatgtgtttttccctaaggtgaatgaagcaggtgaattcggcctgattctggtccaaaggaaagcgctaacttccaaactggaacataaagatttaaatatctcggttgactgcagcttcaatcatgggatctgtgactggaaacaggatagagaagatgattttgactggaatcctgctgatcgagataatgctattggcttctatatggcagttccggccttggcaggtcacaagaaagacattggccgattgaaacttctcctacctgacctgcaaccccaaagcaacttctgtttgctctttgattaccggctggccggagacaaagtcgggaaacttcgagtgtttgtgaaaaacagtaacaatgccctggcatgggagaagaccacgagtgaggatgaaaagtggaagacagggaaaattcagttgtatcaaggaactgatgctaccaaaagcatcatttttgaagcagaacgtggcaagggcaaaaccggcgaaatcgcagtggatggcgtcttgcttgtttcaggcttatgtccagatagccttttatctgtggatgactgaatgttactatctttatatttgactttgtatgtcagttccctggtttttttgatattgcatcataggacctctggcattttagaattactagctgaaaaattgtaatgtaccaacagaaatattattgtaagatgcctttcttgtataagatatgccaatatttgctttaaatatcatatcactgtatcttctcagtcatttctgaatctttccacattatattataaaatatggaaatgtcagtttatctcccctcctcagtatatctgatttgtataagtaagttgatgagcttctctctacaacatttctagaaaatagaaaaaaaagcacagagaaatgtttaactgtttgactcttatgatacttcttggaaactatgacatcaaagatagacttttgcctaagtggcttagctgggtctttcatagccaaacttgtatatttaaattctttgtaataataatatccaaatcatcaaaaaaaaaaaaaaaaa

SEQ ID NO: 28 - DNA, 5532 bp, Homo sapiens
ggcccaccgccgcccaggcaaggccgccctgccttgggcgcagcgctgccatggctgggggccgtggggcccccgggcgcggccgggacgagcctccggagagctacccgcaacgacaggaccacgagctacaggccctggaggccatctacggcgcggacttccaagacctgcggccggacgcttgcggaccggtcaaagagccccctgaaatcaatttagttttgtaccctcaaggcctaactggtgaagaagtatatgtaaaagtggatttgagggttaaatgcccacctacctatccagatgtagttcctgaaatagagttaaaaaatgccaaaggtctatcaaatgaaagtgtcaatttgttaaaatctcgcctagaagaactggccaagaaacactgtggggaggtgatgatctttgaactggcttaccacgtgcagtcatttctcagcgagcataacaagccccctcccaagtcttttcatgaagaaatgctggaaaggcgggctcaggaggagcagcagaggctgttggaggccaagcggaaagaagagcaggagcaacgtgaaatcctgcatgagattcagagaaggaaagaagagataaaagaagagaaaaaaaggaaagaaatggctaagcaggaacgtttggaaattgctagtttgtcaaaccaagatcatacctctaagaaggacccaggaggacacagaacggctgccattctacatggaggctctcctgactttgtaggaaatggtaaacatcgggcaaactcctcaggaaggtctaggcgagaacgtcagtattctgtatgtaatagtgaagattctcctggctcttgtgaaattctgtatttcaatatggggagtcctgatcagctcatggtgcacaaagggaaatgtattggcagtgatgaacaacttggaaaattagtctacaatgctttggaaacagccactggtggctttgtcttgttgtatgagtgggtccttcagtggcagaaaaaaatgggtccattccttaccagtcaagaaaaagagaagattgataagtgcaaaaagcagattcaaggaacagaaacagaattcaactcactggtaaaattgagccatccaaatgtagtacgctaccttgcaatgaatctcaaagagcaagacgactccatcgtggtggacattttagtggagcacattagtggggtctctcttgctgcacacctgagccactcaggccccatccctgtgcatcagcttcgcaggtacacagctcagctcctgtcaggccttgattatctgcacagcaattctgtggtgcataaggtcctgagtgcatctaatgtcttggtggatgcagaaggcaccgtcaagattacggactatagcatttctaagcgcctcgcagacatttgcaaggaggatgtgtttgagcaaacccgagttcgttttagtgacaatgctctgccttataaaacggggaagaaaggagatgtttggcgtcttggccttctgctgctgtccctcagccaaggacaggaatgtggagagtaccctgtgaccatccctagtgacttaccagctgactttcaagattttctaaagaaatgtgtgtgcttggatgacaaggaaagatggagtccccagcagttgttgaaacacagctttataaatccccagccaaaaatgcctctagtggaacaaagtcctgaagattctgaaggacaagattatgttgagactgttattcctagcaaccggctacccagtgctgccttctttagtgagacacagagacagttttcccgatacttcattgagtttgaagaattacaacttcttggtaaaggagcttttggagctgtcatcaaggtgcagaacaagttggacggctgctgctacgcagtgaagcgcatccccatcaacccggccagccggcagttccgcaggatcaagggcgaagtgacactgctgtcacggctgcaccatgagaacattgtgcgctactacaacgcctggatcgagcggcacgagcggccggcgggaccggggacgccgcccccggactccgggcccctggccaaggatgaccgagctgcacgcgggcagccggcgagcgacacagacggcctggacagcgtagaggccgccgcgccgccacccatcctcagcagctcggtggagtggagcacttcgggcgagcgctcggccagtgcccgtttccccgccaccggcccgggctccagcgatgacgaggacgacgacgaggacgagcacggtggcgtcttctcccagtccttcctgcctgcttcagattctgaaagtgatattatctttgacaatgaagatgagaacagtaaaagtcagaatcaggatgaagattgcaatgaaaagaatggctgccatgaaagtgagccatcagtgacgactgaggctgtgcactacctatacatccagatggagtactgtgagaagagcactttacgagacaccattgaccagggactgtatcgagacaccgtcagactctggaggctttttcgagagattctggatggattagcttatatccatgagaaaggaatgattcaccgggatttgaagcctgtcaacatttttttggattctgatgaccatgtgaaaataggtgattttggtttggcgacagaccatctagccttttctgctgacagcaaacaagacgatcagacaggagacttgattaagtcagacccttcaggtcacttaactgggatggttggcactgctctctatgtaagcccagaggtccaaggaagcaccaaatctgcatacaaccagaaagtggatctcttcagcctgggaattatcttctttgagatgtcctatcaccccatggtcacggcttcagaaaggatctttgttctcaaccaactcagagatcccacttcgcctaagtttccagaagactttgacgatggagagcatgcaaagcagaaatcagtcatctcctggctgttgaaccacgatccagcaaaacggcccacagccacagaactgctcaagagtgagctgctgcccccaccccagatggaggagtcagagctgcatgaagtgctgcaccacacgctgaccaacgtggatgggaaggcctaccgcaccatgatggcccagatcttctcgcagcgcatctcccctgccatcgattacacctatgacagcgacatactgaagggcaacttctcaatccgtacagccaagatgcagcagcatgtgtgtgaaaccatcatccgcatctttaaaagacatggagctgttcagttgtgtactccactactgcttccccgaaacagacaaatatatgagcacaacgaagctgccctattcatggaccacagcgggatgctggtgatgcttccttttgacctgcggatcccttttgcaagatatgtggcaagaaataatatattgaatttaaaacgatactgcatagaacgtgtgttcaggccgcgcaagttagatcgatttcatcccaaagaacttctggagtgtgcatttgatattgtcacttctaccaccaacagctttctgcccactgctgaaattatctacactatctatgaaatcatccaagagtttccagcacttcaggaaagaaattacagtatttatttgaaccataccatgttattgaaagcaatactcttacactgtgggatcccagaagataaactcagtcaagtctacattattctgtatgatgctgtgacagagaagctgacgaggagagaagtggaagctaaattttgtaatctgtctttgtcttctaatagtctgtgtcgactctacaagtttattgaacagaagggagatttgcaagatcttatgccaacaataaattcattaataaaacagaaaacaggtattgcacagttggtgaagtatggcttaaaagacctagaggaggttgttggactgttgaagaaactcggcatcaagttacaggtcttgatcaatttgggcttggtttacaaggtgcagcagcacaatggaatcatcttccagtttgtggctttcatcaaacgaaggcaaagggctgtacctgaaatcctcgcagctggaggcagatatgacctgctgattccccagtttagagggccacaagctctggggccagttcccactgccattggggtcagcatagctatagacaagatatctgctgctgtcctcaacatggaggaatctgttacaataagctcttgtgacctcctggttgtaagtgttggccagatgtctatgtccagggccatcaacctaacccagaaactctggacagcaggcatcacagcagaaatcatgtacgactggtcacagtcccaagaggaattacaagagtactgcagacatcatgaaatcacctatgtggcccttgtctcggataaagaaggaagccatgtcaaggttaagtctttcgagaaggaaaggcagacagagaagcgtgtgctggagactgaacttgtggaccatgtactgcagaaactgaggactaaagtcactgatgaaaggaatggcagagaagcttccgataatcttgcagtgcaaaatctgaaggggtcattttctaatgcttcaggtttgtttgaaatccatggagcaacagtggttcccattgtgagtgtgctagccccggagaagctgtcagccagcactaggaggcgctatgaaactcaggtacaaactcgacttcagacctcccttgccaacttacatcagaaaagcagtgaaattgaaattctggctgtggatctacccaaagaaacaatattacagtttttatcattagagtgggatgctgatgaacaggcatttaacacaactgtgaagcagctgctgtcacgcctgccaaagcaaagatacctcaaattagtctgtgatgaaatttataacatcaaagtagaaaaaaaggtgtctgtgctatttctgtacagctatagagatgactactacagaatcttattttaaccctaaagaactgtcgttaacctcattcaaacagacagaggcttatactggaataatggaatgttgtacattcatcataatttaaaattaaattctaagaagaggctgggtgcagtggctcacacctttaatcccagcactttgggaagccaaggcaggaagactgcttgaaaccaggagtttgagaccagcctgagcaacaaagcaagaccccatctctataaaaactaaaaaaattagttgggcatggtggcacatgcctgtagtcccagctactccagaggctgagatggatcatctgagcctcaggaggttgaggctgcagtgagctgtgactgcgccactgcactccagtctgggacaacagagcaagaccctgtcttaaaaaaaaaaagaaaaaaaaaatttttttctaagaagctgtcctacaaagttgagctttgttagtttttcatgtgtaatatattataaatttatcttttgggatataataaatgctttcatatacctgcaaaaaaaaaaaaaaaaaaaa

SEQ ID NO: 29 - DNA, 709 bp, Homo sapiens
atttacaataaatgaagattaccctcaaatgctagaagctgtctaggtccgtccggtgtgtcagattttcctcagattagatgtgccaataaccaagtttattcagtaaacaacttgtacttgtttcatctggttttattactctcacccataaacaggaatgactctttgaccctctggaaatatgtaatgcttccaatcttgctttgtgtatctcatttaatttgttataaggtagtactgattttagcatattaatgcgatttcttccttgttgtttgctttggtctgtgttcaatccagagagcttaaattgtcattattttgggaagaaaacctgtatttttgttagtttacaatattatgaaatttcacttcaggagaaactgctgggcttcctgtggctttgttttcttagttactttttccgtgccgtgtattttttaattgatttttcttcttttacttgaaaagaaagtgttttattttcaaatctggtccatatttacattctagttcagagccaagccttaaactgtacagaatttccactgtaattaaaactatttagtgttagttataaatagccttcaaaaagagagattctccattcacgatcacctgcatcacagcccatggtgaatgtatgtttctgcatagcgaaataaaaatggcaaatgcaaaaaaaaaaaaaaaaaaaaaaaaaaaa

SEQ ID NO: 30 - DNA, 1634 bp, Homo sapiens
gctgcttcccaccagcaaagaccacgactggagagccgagccggaggcagctgggaaacatgaagagcgtcttgctgctgaccacgctcctcgtgcctgcacacctggtggccgcctggagcaataattatgcggtggactgccctcaacactgtgacagcagtgagtgcaaaagcagcccgcgctgcgagaggacagtgctcgacgactgtggctgctgccgagtgtgcgctgcagggcggggagaaacttgctaccgcacagtctcaggcatggatggcatgaagtgtggcccggggctgaggtgtcagccttctaatggggaggatccttttggtgaagagtttggtatctgcaaagactgtccctacggcaccttcgggatggattgcagagagacctgcaactgccagtcaggcatctgtgacagggggacgggaaaatgcctgaaattccccttcttccaatattcagtaaccaagtcttccaacagatttgtttctctcacggagcatgacatggcatctggagatggcaatattgtgagagaagaagttgtgaaagagaatgctgccgggtctcccgtaatgaggaaatggttaaatccacgctgatcccggctgtgatttctgagagaaggctctattttcgtgattgttcaacacacagccaacattttaggaactttctagattatagcataaggacatgtaatttttgaagaccaaatgtgatgcatggtggatccagaaaacaaaaagtaggatacttacaatccataacatccatatgactgaacacttgtatgtgtttgttaaatattcgaatgcatgtagatttgttaaatgtgtgtgtatagtaacactgaagaactaaaaatgcaatttaggtaatcttacatggagacaggtcaaccaaagagggagctaggcaaagctgaagaccgcagtgagtcaaattagttctttgactttgatgtacattaatgttgggatatggaatgaagacttaagagcaggagaagatggggagggggtgggagtgggaaataaaatatttagcccttccttggtaggtagcttctctagaatttaattgtgctttttttttttggctttgggaaaagtcaaaataaaacaaccagaaaacccctgaaggaagtaagatgtttgaagcttatggaaatttgagtaacaaacagctttgaactgagagcaatttcaaaaggctgctgatgtagttcccgggttacctgtatctgaaggacggttctggggcataggaaacacatacacttccataaatagctttaacgtatgccacctcagagataaatctaagaagtattttacccactggtggtttgtgtgtgtatgaaggtaaatatttatatatttttataaataaatgtgttagtgcaagtcatcttccctacccatatttatcatcctcttgaggaaagaaatctagtattatttgttgaaaatggttagaataaaactatgactctataaggttttcaaacatctgaggcatgataaatttattatccataattatagtaataataaccttaataagcataagaaaaacagagtcactctggatttcaaaaatgtcaaaaaaaaaaaaaa

SEQ ID NO: 31 - DNA, 1530 bp, Homo sapiens
agcactcccggagcctgcaacgcttgagatcctctccgcgcccgccaccccgcagggtgccccgcgccgttcccgccgccccgccgcccccgtcgcgggcccctgcaccccgagcatccgccccgggtggcacgtccccgagcccaccaggccggccccgtctccccatccgtctagtccgctcgcggtgccatgccattcctcgggcaggactggcggtcccccgggcagaactgggtgaagacggccgacggctggaagcgcttcctggatgagaagagcggcagtttcgtgagcgacctcagcagttactgcaacaaggaggtatacaataaggagaatcttttcaacagcctgaactatgatgttgcagccaagaagagaaagaaggacatgctgaatagcaaaaccaaaactcagtatttccaccaagaaaaatggatctatgttcacaaaggaagtactaaagagcgccatggatattgcaccctgggggaagctttcaacagactggacttctcaactgccattctggattccagaagatttaactacgtggtccggctgttggagctgatagcaaagtcacagctcacatccctgagtggcatcgcccaaaagaacttcatgaatattttggaaaaagtggtactgaaagtccttgaagaccagcaaaacattagactaataagggaactactccagaccctctacacatccttatgtacactggtccaaagagtcggcaagtctgtgctggtcgggaacattaacatgtgggtgtatcggatggagacgattctccactggcagcagcagctgaacaacattcagatcaccaggcctgccttcaaaggcctcaccttcactgacctgcctttgtgcctacaactgaacatcatgcagaggctgagcgacgggcgggacctggtcagcctgggccaggctgcccccgacctgcacgtgctcagcgaagaccggctgctgtggaagaaactctgccagtaccacttctccgagcggcagatccgcaaacgattaattctgtcagacaaagggcagctggattggaagaagatgtatttcaaacttgtccgatgttacccaaggaaagagcagtatggagatacccttcagctctgcaaacactgtcacatcctttcctggaagggcactgaccatccgtgcactgccaataacccagagagctgctccgtttcactttcaccccaggactttatcaacttgttcaagttctgaatcccagcacatgacaacacttcagaagggtccccctgctgactggagagctgggaatatggcatttggacacttcatttgtaaatagtgtacattttaaacattggctcgaaacttcagagataagtcatggagaggacattggaggggagaaatgcagttgctgactgggaatttaagaatgtgaacttctcactagaattggtatggaaaagcaaaatactgtaaataaactttttttctaacaatttgccaaaaaaaaaaaaaaaa

SEQ ID NO: 32 - DNA, 2367 bp, Homo sapiens
gcggccgcgatggggccgaagcgcccgaagccccggagcccacaaactgccgggcccgcctcgccgccgggacccgggtgcctgggctcggcttgaagcggcggcggcgcaccggcacagccgcgggagcatgggcaggaggatgcggggcgccgccgccaccgcggggctctggctgctggcgctgggctcgctgctggcgctgtggggagggctcctgccgccgcggaccgagctgcccgcctcccggccgcccgaagaccgactcccacggcgcccggcccggagcggcggccccgcgcccgcgcctcgcttccctctgcccccgcccctggcgtgggacgcccgcggcggctccctgaaaactttccgggcgctgctcaccctggcggccggcgcggacggcccgccccggcagtcccggagcgagcccaggtggcacgtgtcagccaggcagccccggccggaggagagcgccgcggtgcacgggggcgtcttctggagccgcggcctggaggagcaggtgcccccgggcttttcggaggcccaggcggcggcgtggctggaggcggctcgcggcgcccggatggtggccctggagcgcgggggttgcgggcgcagctccaaccgactggcccgttttgccgacggcacccgcgcctgcgtgcgctacggcatcaacccggagcagattcagggcgaggccctgtcttactatctggcgcgcctgctgggcctccagcgccacgtgccgccgctggcactggctcgggtggaggctcggggcgcgcagtgggcgcaggtgcaggaggagctgcgcgctgcgcactggaccgagggcagcgtggtgagcctgacacgctggctgcccaacctcacggacgtggtggtgcccgcgccctggcgctcggaggacggccgtctgcgccccctccgggatgccgggggtgagctggccaacctcagccaggcggagctggtggacctagtacaatggaccgacttaatccttttcgactacctgacggccaacttcgaccggctcgtaagcaacctcttcagcctgcagtgggacccgcgcgtcatgcagcgtgccaccagcaacctgcaccgcggtccgggcggggcgctggtctttctggacaatgaggcgggcttggtgcacggctaccgggtagcaggcatgtgggacaagtataacgagccgctgttgcagtcagtgtgcgtgttccgcgagcggaccgcgcggcgcgtcctggagctgcaccgcggacaggacgccgcggcccggctgctgcgcctctaccggcgccacgagcctcgcttccccgagctggccgcccttgcagacccccacgctcagctgctacagcgccgcctcgacttcctcgccaagcacattttgcactgtaaggccaagtacggccgccggtctgggacttagtgtcaccgggaggaaaagagagagatctggggctggggtatggatgatggggggaagggcggtcgcctctgccactgtcagggaccagccggccaacgcccacccgcaaaggtgtctaaaaacttcagcttttcacccacctgcccctttctttcaatcccacgctgtttcctttcaaagttctgggaggacgaactcaccgaggcgagaagtgtaacattctctccacccagcttataaaaggattctttactgtgccagcacggggattggatccgaagaaactggctactggggtttggcccccgagtggccgtccctgtgggagatgcaccccattcttgggcccccctcattccctttccgaaaaaggaaaacttgcgtttgagccgttgagctaattctgcaattttctaccaaacagagcgctggtggccccggagcagggctgtgacattggctggtggagccccttcctgtgttctccctttgttccagcgccgcgatggtgagatcactgttccaagcagggggacggctcgcgataggacaaagagagcaggacctccagactctggggagccctgcagaccttgacaatttgcctgactcattcctgacctcttgtcattttggcctgaaggctacaaattcagggtcagctgtatgcactaagtcaaataatgaatttcttcctccctctcgcaaccgaccaaaattttgacaacgatgatgttcaccagaaggaaaaaaaaatcagttttatgcactttattttgttttgattttcattttttattaagaaaaaattttattttacagaatttaccttctctgtatatatgtgcataaagtgtggtgtaaatatactaaacaaacttatatttcaataaaagggagtttaaaatttaaaaaaaaaaaaa

SEQ ID NO: 33 - DNA, 2472 bp, Homo sapiens
ctggaccccaggtctggagcgaattccagcctgcagggctgataagcgaggcattagtgagattgagagagactttaccccgccgtggtggttggagggcgcgcagtagagcagcagcacaggcgcgggtcccgggaggccggctctgctcgcgccgagatgtggaatctccttcacgaaaccgactcggctgtggccaccgcgcgccgcccgcgctggctgtgcgctggggcgctggtgctggcgggtggcttctttctcctcggcttcctcttcgggtggtttataaaatcctccaatgaagctactaacattactccaaagcataatatgaaagcatttttggatgaattgaaagctgagaacatcaagaagttcttatataattttacacagataccacatttagcaggaacagaacaaaactttcagcttgcaaagcaaattcaatcccagtggaaagaatttggcctggattctgttgagctagcacattatgatgtcctgttgtcctacccaaataagactcatcccaactacatctcaataattaatgaagatggaaatgagattttcaacacatcattatttgaaccacctcctccaggatatgaaaatgtttcggatattgtaccacctttcagtgctttctctcctcaaggaatgccagagggcgatctagtgtatgttaactatgcacgaactgaagacttctttaaattggaacgggacatgaaaatcaattgctctgggaaaattgtaattgccagatatgggaaagttttcagaggaaataaggttaaaaatgcccagctggcaggggccaaaggagtcattctctactccgaccctgctgactactttgctcctggggtgaagtcctatccagatggttggaatcttcctggaggtggtgtccagcgtggaaatatcctaaatctgaatggtgcaggagaccctctcacaccaggttacccagcaaatgaatatgcttataggcgtggaattgcagaggctgttggtcttccaagtattcctgttcatccaattggatactatgatgcacagaagctcctagaaaaaatgggtggctcagcaccaccagatagcagctggagaggaagtctcaaagtgccctacaatgttggacctggctttactggaaacttttctacacaaaaagtcaagatgcacatccactctaccaatgaagtgacaagaatttacaatgtgataggtactctcagaggagcagtggaaccagacagatatgtcattctgggaggtcaccgggactcatgggtgtttggtggtattgaccctcagagtggagcagctgttgttcatgaaattgtgaggagctttggaacactgaaaaaggaagggtggagacctagaagaacaattttgtttgcaagctgggatgcagaagaatttggtcttcttggttctactgagtgggcagaggagaattcaagactccttcaagagcgtggcgtggcttatattaatgctgactcatctatagaaggaaactacactctgagagttgattgtacaccgctgatgtacagcttggtacacaacctaacaaaagagctgaaaagccctgatgaaggctttgaaggcaaatctctttatgaaagttggactaaaaaaagtccttccccagagttcagtggcatgcccaggataagcaaattgggatctggaaatgattttgaggtgttcttccaacgacttggaattgcttcaggcagagcacggtatactaaaaattgggaaacaaacaaattcagcggctatccactgtatcacagtgtctatgaaacatatgagttggtggaaaagttttatgatccaatgtttaaatatcacctcactgtggcccaggttcgaggagggatggtgtttgagctagccaattccatagtgctcccttttgattgtcgagattatgctgtagttttaagaaagtatgctgacaaaatctacagtatttctatgaaacatccacaggaaatgaagacatacagtgtatcatttgattcacttttttctgcagtaaagaattttacagaaattgcttccaagttcagtgagagactccaggactttgacaaaagcaagcatgtcatctatgctccaagcagccacaacaagtatgcaggggagtcattcccaggaatttatgatgctctgtttgatattgaaagcaaagtggacccttccaaggcctggggagaagtgaagagacagatttatgttgcagccttcacagtgcaggcagctgcagagactttgagtgaagtagcctaagaggattctttagagaatccgtattgaatttgtgtggtatgtcactcagaaagaatcgtaatgggtatattgataaattttaaaattggtatatttgaaataaagttgaatattatatataaaaaaaaaaaaaaaaaaaaaaaaaaaaaaaaa

SEQ ID NO: 34 - DNA, 1010 bp, Homo sapiens
gtctggccccgccttttctctgctctcctgaacctttaggcttgtctcggcccatttgaagaccaggaagttgatcaatcccgaggctgctgagagacggtggcgcgattgggacagtcgccagggatggctgagcgtgaagatgcagcgggtgtccgggctgctctcctggacgctgagcagagtcctgtggctctccggcctctctgagccgggagctgcccggcagccccggatcatggaagagaaagcgctagaggtttatgatttgattagaactatccgggacccagaaaagcccaatactttagaagaactggaagtggtctcggaaagttgtgtggaagttcaggagataaatgaagaagaatatctggttattatcaggttcacgccaacagtacctcattgctctttggcgactcttattgggctgtgcttaagagtaaaacttcagcgatgtttaccatttaaacataagttggaaatctacatttctgaaggaacccactcaacagaagaagacatcaataagcagataaatgacaaagagcgagtggcagctgcaatggaaaaccccaacttacgggaaattgtggaacagtgtgtccttgaacctgactgatagctgttttaagagccactggcctgtaattgtttgatatatttgtttaaactctttgtataatgtcagagactcatgtttaatacataggtgatttgtacctcagagcattttttaaaggattctttccaagcgagatttaattataaggtagtacctaatttgttcaatgtataacattctcaggatttgtaacacttaaatgatcagacagaataatattttctagttattatgtgtaagatgagttgctatttttctgatgctcattctgatacaactatttttcgtgtcaaatatctactgtgcccaaatgtactcaatttaaatcattactctgtaaaataaataagcagatgattcttataaaaaaaaaaaaaaaaaa

SEQ ID NO: 35 - DNA, 2960 bp, Homo sapiens
accaggtgctccataatgagtcaaaagggagccccacctcggcttaccctgagcggaaggggagccccacgcctgggttttccactcgaagaggaagtccaactacaggatttatcgagcagaaggggagccccacctcagcctaccccgagcgcaggggtagtccggtgccccccgtgccggagcgcaggagcagtccggtgccccccgtgccggagcgcaggggcagcctcacccttaccatctccggggagtccccgaaggccgggcccgcggaggaggggccgagcggccccatggaagtcttgcgcaaaggctccttgcgtcttaggcagctgctgagccccaagggcgagcggcgcatggaggatgagggtggcttcccagtgccgcaggagaacggccaacccgagagcccgcggcgtctgtcactgggccagggtgacagcacggaggctgccacagaagagcggggtccgcgggcgcgcctgtcctcagccacggccaacgccttgtacagcagcaaccttcgggatgacacgaaggccattctggagcagatcagtgcccacggccagaagcaccgtgcggtccctgccccgagccccggcccgacccacaacagccccgagctaggccgtccaccggctgctggcgtcctggccccagatatgtccgacaaggacaagtgttcagccatcttccgctcggacagcttggggacccagggccggctgagccgcacgctgccagccagcgcggaggagcgcgatcggctgctgcgccgcatggagagcatgcgcaaggagaagcgcgtgtacagccgcttcgaggtcttctgcaagaaagaggaggccagcagccctggggcaggggaaggccccgcggaggagggcaccagggacagcaaggtgggcaagttcgtgcccaagatcctgggcacgttcaaaagcaagaagtgagtcttctggcctggcaacccaggccagggtgcccgcatcgctgccccggtcatccagaagccccgcggaacagagagccctgctcatgtgcttgagcagcggctgtcaggccacggccgcttggggcttggctgagtgcgccagacctcggctccactggaggctcacctggcagctgccgtctctgccccctggcctccccaacgctggggctgcacccctcgccaccagtgcctttctcccctcagcaccttcatctctgcaccgtcagccttgcgtggcgcagcgtctggctccgccatctctttgtgcctcagtcccccccgccccctttatttttttgagatctagggctggagtgcagttgagcggtctgggctcactgcaacctctgcctcccgggttccagcgattctcctgcctcagcctcctgagtagctgggattacagatgtatgctaccacgcccaggtagtttttgtatttttagtagagacagggtttcactatgttggccaggctggtctccaactcctggcctcaaatgatcagcccgcttcagcctcccaaagtggggggattacaggcgtgagccttgcaccccgctaagtcccctatcctcttgcaagggtctcacctctgtgcctcaattcctcattctctgggcccttctcctcctcagggcctcctgttctcagggcctcccccctccccgctccctccctctctcaaggtctcctccttccctccccccccccccgtctcccccctcccccgcctgggcttcacttcctttcctacttggattctcctgctcgctgcctcccagcatcttttttggaggcccgtctcttgctgtggggaagactgggctggctgcgggcagtttgcaaggggtgggtggggcgggggggggagctggaccagaagatgccccttggagtggcaaggaagctggacagggcaggcctctggggacgggacacagggaagcccgaaggggcgccttggccaggtctgccatctcctccagcgaggctctggccagcactgggtgagagtggggagggggcactggcctttgcagcacagtaaaacatggtccagacaacctgtggccccggcctcatgagcaccccctgcacaggcccagcccaagccaggcgctagaagggctggttgtggagtgcttatccttgacaggtatggggccaggtgagggcaggggacaaggtgcagctgaggccgagcccaactaggtcctgggcacccctgcaggtgggagtggtccttgtcctcctggtatccagcagacacccccctctccccaccagccccattctcaggtcctttcctctttgtcaccaacaccaagaatctgtccagggttcttggcttatcttttatctcttttcactcctagagaggaattgcaattgactcagaatgacacattttggcaccacgtgtgtagaaagcccccactgttagatgatagcctcgtgaaattcatgtttctgtattctcctatttcttttcaaaaactaattttttttttagtgtaataaatcctaagagggaactgatttaagaaacaaggccgccaaacaaaggcagcagttccgactccagcagctgggaaaggaaggaaagtgaccccactttcactcctgcacagcccactggttaccaaaaccaccgtgcaagtcgggatgacagcagggacttctggccaggtgggaaaggtgcctggaagcgggatgcgcctgtgcgtctcttggccatgatgttcttgtgggcatgttattcttggtgctgcctggggtgttgctgagcggacaggctctccagctggagtccatggagaggccagaggctggcggccctgcctgggccttcggagcctcctgcctgcaccctccacctcttctaaaccatgatgtggcacattttggtgttaataaaacacaacacacaaagtaaaaaaaaaaaaaaaaaa

SEQ ID NO: 36 - DNA, 2813 bp, Homo sapiens
ctgactttctctcggtgcgtccagtggagctctgagtttcgaatcggtggcggcggattccccgcgcgcccggcgtcggggcttccaggaggatgcggagccccagcgcggcgtggctgctgggggccgccatcctgctagcagcctctctctcctgcagtggcaccatccaaggaaccaatagatcctctaaaggaagaagccttattggtaaggttgatggcacatcccacgtcactggaaaaggagttacagttgaaacagtcttttctgtggatgagttttctgcatctgtcctcactggaaaactgaccactgtcttccttccaattgtctacacaattgtgtttgtggtgggtttgccaagtaacggcatggccctgtgggtctttcttttccgaactaagaagaagcaccctgctgtgatttacatggccaatctggccttggctgacctcctctctgtcatctggttccccttgaagattgcctatcacatacatggcaacaactggatttatggggaagctctttgtaatgtgcttattggctttttctatggcaacatgtactgttccattctcttcatgacctgcctcagtgtgcagaggtattgggtcatcgtgaaccccatggggcactccaggaagaaggcaaacattgccattggcatctccctggcaatatggctgctgattctgctggtcaccatccctttgtatgtcgtgaagcagaccatcttcattcctgccctgaacatcacgacctgtcatgatgttttgcctgagcagctcttggtgggagacatgttcaattacttcctctctctggccattggggtctttctgttcccagccttcctcacagcctctgcctatgtgctgatgatcagaatgctgcgatcttctgccatggatgaaaactcagagaagaaaaggaagagggccatcaaactcattgtcactgtcctggccatgtacctgatctgcttcactcctagtaaccttctgcttgtggtgcattattttctgattaagagccagggccagagccatgtctatgccctgtacattgtagccctctgcctctctacccttaacagctgcatcgacccctttgtctattactttgtttcacatgatttcagggatcatgcaaagaacgctctcctttgccgaagtgtccgcactgtaaagcagatgcaagtatccctcacctcaaagaaacactccaggaaatccagctcttactcttcaagttcaaccactgttaagacctcctattgagttttccaggtcctcagatgggaattgcacagtaggatgtggaacctgtttaatgttatgaggacgtgtctgttatttcctaatcaaaaaggtctcaccacataccatgtggatgcagcacctctcaggattgctaggagctcccctgtttgcatgagaaaagtagtcccccaaattaacatcagtgtctgtttcagaatctctctactcagatgaccccagaaactgaaccaacagaagcagacttttcagaagatggtgaagacagaaacccagtaacttgcaaaaagtagacttggtgtgaagactcacttctcagctgaaattatatatatacacatatatatatatattttacatctgggatcatgatagacttgttagggcttcaaggccctcagagatgatcagtccaactgaacgaccttacaaatgaggaaaccaagataaatgagctgccagaatcaggtttccaatcaacagcagtgagatgggattggacagtagaatttcaatgtccagtgagtgaggttcttgtaccacttcatcaaaatcatggatcttggctgggtgcggtgcctcatgcctgtaatcctagcactttgggaggctgaggcaggcaatcacttgaggtcaggagttcgagaccagcctggccatcatggcgaaacctcatctctactaaaaatacaaaagttaaccaggtgtgtggtgcacgtttgtaatcccagttactcaggaggctgaggcacaagaattgagtatcactttaactcaggaggcagaggttgcagtgagccgagattgcaccactgcactccagcttgggtgataaaataaaataaaatagtcgtgaatcttgttcaaaatgcagattcctcagattcaataatgagagctcagactgggaacagggcccaggaatctgtgtggtacaaacctgcatggtgtttatgcacacagagatttgagaaccattgttctgaatgctgcttccatttgacaaagtgccgtgataatttttgaaaagagaagcaaacaatggtgtctcttttatgttcagcttataatgaaatctgtttgttgacttattaggactttgaattatttctttattaaccctctgagtttttgtatgtattattattaaagaaaaatgcaatcaggattttaaacatgtaaatacaaattttgtataacttttgatgacttcagtgaaattttcaggtagtctgagtaatagattgttttgccacttagaatagcatttgccacttagtattttaaaaaataattgttggagtatttattgtcagttttgttcacttgttatctaatacaaaattataaagccttcagagggtttggaccacatctctttggaaaatagtttgcaacatatttaagagatacttgatgccaaaatgactttatacaacgattgtatttgtgacttttaaaaataattattttattgtgtaattgatttataaataacaaaattttttttacaacttaaaaaaaaaa

SEQ ID NO: 37 - DNA, 2811 bp, Homo sapiens
acacgtccaacgccagcatgcagcgcccgggcccccgcctgtggctggtcctgcaggtgatgggctcgtgcgccgccatcagctccatggacatggagcgcccgggcgacggcaaatgccagcccatcgagatcccgatgtgcaaggacatcggctacaacatgactcgtatgcccaacctgatgggccacgagaaccagcgcgaggcagccatccagttgcacgagttcgcgccgctggtggagtacggctgccacggccacctccgcttcttcctgtgctcgctgtacgcgccgatgtgcaccgagcaggtctctacccccatccccgcctgccgggtcatgtgcgagcaggcccggctcaagtgctccccgattatggagcagttcaacttcaagtggcccgactccctggactgccggaaactccccaacaagaacgaccccaactacctgtgcatggaggcgcccaacaacggctcggacgagcccacccggggctcgggcctgttcccgccgctgttccggccgcagcggccccacagcgcgcaggagcacccgctgaaggacgggggccccgggcgcggcggctgcgacaacccgggcaagttccaccacgtggagaagagcgcgtcgtgcgcgccgctctgcacgcccggcgtggacgtgtactggagccgcgaggacaagcgcttcgcagtggtctggctggccatctgggcggtgctgtgcttcttctccagcgccttcaccgtgctcaccttcctcatcgacccggcccgcttccgctaccccgagcgccccatcatcttcctctccatgtgctactgcgtctactccgtgggctacctcatccgcctcttcgccggcgccgagagcatcgcctgcgaccgggacagcggccagctctatgtcatccaggagggactggagagcaccggctgcacgctggtcttcctggtcctctactacttcggcatggccagctcgctgtggtgggtggtcctcacgctcacctggttcctggccgccggcaagaagtggggccacgaggccatcgaagccaacagcagctacttccacctggcagcctgggccatcccggcggtgaagaccatcctgatcctggtcatgcgcagggtggcgggggacgagctcaccggggtctgctacgtgggcagcatggacgtcaacgcgctcaccggcttcgtgctcattcccctggcctgctacctggtcatcggcacgtccttcatcctctcgggcttcgtggccctgttccacatccggagggtgatgaagacgggcggcgagaacacggacaagctggagaagctcatggtgcgtatcgggctcttctctgtgctgtacaccgtgccggccacctgtgtgatcgcctgctacttttacgaacgcctcaacatggattactggaagatcctggcggcgcagcacaagtgcaaaatgaacaaccagactaaaacgctggactgcctgatggccgcctccatccccgccgtggagatcttcatggtgaagatctttatgctgctggtggtggggatcaccagcgggatgtggatttggacctccaagactctgcagtcctggcagcaggtgtgcagccgtaggttaaagaagaagagccggagaaaaccggccagcgtgatcaccagcggtgggatttacaaaaaagcccagcatccccagaaaactcaccacgggaaatatgagatccctgcccagtcgcccacctgcgtgtgaacagggctggagggaagggcacaggggcgcccggagctaagatgtggtgcttttcttggttgtgtttttctttcttcttcttcttttttttttttttataaaagcaaaagagaaatacataaaaaagtgtttaccctgaaattcaggatgctgtgatacactgaaaggaaaaatgtacttaaagggttttgttttgttttggttttccagcgaagggaagctcctccagtgaagtagcctcttgtgtaactaatttgtggtaaagtagttgattcagccctcagaagaaaacttttgtttagagccctccgtaaatatacatctgtgtatttgagttggctttgctacccatttacaaataagaggacagataactgctttgcaaattcaagagcctcccctgggttaacaaatgagccatccccagggcccacccccaggaaggccacagtgctgggcggcatccctgcagaggaaagacaggacccggggcccgcctcacaccccagtggatttggagttgcttaaaatagactctggccttcaccaatagtctctctgcaagacagaaacctccatcaaacctcacatttgtgaactcaaacgatgtgcaatacatttttttctctttccttgaaaataaaaagagaaacaagtattttgctatatataaagacaacaaaagaaatctcctaacaaaagaactaagaggcccagccctcagaaacccttcagtgctacattttgtggctttttaatggaaaccaagccaatgttatagacgtttggactgatttgtggaaaggaggggggaagagggagaaggatcattcaaaagttacccaaagggcttattgactctttctattgttaaacaaatgatttccacaaacagatcaggaagcactaggttggcagagacactttgtctagtgtattctcttcacagtgccaggaaagagtggtttctgcgtgtgtatatttgtaatatatgatatttttcatgctccactattttattaaaaataaaatatgttctttaaaaaaa

SEQ ID NO: 38 - DNA, 1473 bp, Homo sapiens
ggagtccaaaagaaaaggaagaggaggaaaaacaagtgtgtgttggggggaacagggggaaaagcatttttggtggatggtatgaagccagccatggaaactgcagccgaggaaaatactgaacaaagccaagagagaaaaggctgctttgaatgctgcatcaagtgtctgggaggagtcccctacgcctccctggtggccaccatcctctgcttctccggggtggccttattctgcggctgtgggcatgtggctctcgcaggcaccgtggcgattcttgagcaacacttctccaccaacgccagtgaccatgccttgctgagcgaggtgatacaactgatgcagtatgtcatctatggaattgcgtcctttttcttcttgtatgggatcattctgttggcagaaggcttttacaccacaagtgcagtgaaagaactgcacggtgagtttaaaacaaccgcttgtggccgatgcatcagtggaatgttcgttttcctcacctatgtgcttggagtggcctggctgggtgtgtttggtttctcagcggtgcccgtgtttatgttctacaacatatggtcaacttgtgaagtcatcaagtcaccgcagaccaacgggaccacgggtgtggagcagatctgtgtggatatccgacaatacggtatcattccttggaatgctttccccggaaaaatatgtggctctgccctggagaacatctgcaacacaaacgagttctacatgtcctatcacctgttcattgtggcctgtgcaggagctggtgccaccgtcattgccctgctgatctacatgatggctactacatataactatgcggttttgaagtttaagagtcgggaagattgctgcactaaattctaaattgcataaggagttttagagagctatgctctgtagcatgaaatatcactgacactccagactaaagcagagtctaggtttctgcaattttgttacagtaatttgtaaatagctttagtaaactcaccttgcatggtagattaataagatgacttactgtacatgaattacacaataatgagatctggtggctatttccacattttgaaaaggattcagttatttactgacagtggtgagcatcctttttaaaataatgttctcatacttaaacattagagagcagtatctttaaatgaattattaacactttggaatacttacattttctgttatttttgattgcctgataaccagtttcaatgatgaaaatgaaaacaagtgctgaagatgaaatggaagagaaccgttttaatctggattttgttttgtcacacctggaaaatactttgcaaatatgttctaaattgaaaacaattttttttatgatcacatggttcactaccaaatgaccctcaaataagccagatgaaaatttgaagaaaaaggtcacccagttctctggaaaaaaaaaaaaaaaaaaaaaaaaaaaaa

SEQ ID NO: 39 - DNA, 2428 bp, Homo sapiens
agtgttaccttggagcctacaatgagaggtatttcaaaatgagtgaagcatgactctcacagatgaaggcctagacgcaggatctttaatgaaaaaacacttgggccacttcaagacgacaaacgctcactgggcaaaacaccttcactgaaaagagacctcatattatgcaaaaaaaatcttaaaaggcctctgccttcagaagttacaagatgatcaattcaacctccacacagcctccagatgaatcctgctctcagaacctcctgatcactcagcagatcattcctgtgctgtactgtatggtcttcattgcaggaatcctactcaatggagtgtcaggatggatattcttttacgtgcccagctctgagagtttcatcatctatctcaagaacattgttattgctgactttgtgatgagcctgacttttcctttcaagatccttggtgactcaggccttggtccctggcagctgaacgtgtttgtgtgcagggtctctgccgtgctcttctacgtcaacatgtacgtcagcattgtgttctttgggctcatcagctttgacagatattataaaattgtaaagcctctttggacttctttcatccagtcagtgagttacagcaaacttctgtcagtgatagtatggatgctcatgctcctccttgctgttccaaatattattctcaccaaccagagtgttagggaggttacacaaataaaatgtatagaactgaaaagtgaactgggacggaagtggcacaaagcatcaaactacatcttcgtggccatcttctggattgtgtttcttttgttaatcgttttctatactgctatcacaaagaaaatctttaagtcccaccttaagtcaagtcggaattccacttcggtcaaaaagaaatctagccgcaacatattcagcatcgtgtttgtgttttttgtctgttttgtaccttaccatattgccagaatcccctacacaaagagtcagaccgaagctcattacagctgccagtcaaaagaaatcttgcggtatatgaaagaattcactctgctactatctgctgcaaatgtatgcttggaccctattatttatttctttctatgccagccgtttagggaaatcttatgtaagaaattgcacattccattaaaagctcagaatgacctagacatttccagaatcaaaagaggaaatacaacacttgaaagcacagatactttgtgagttcctaccctcttccaaagaaagaccacgtgtgcatgttgtcatcttcaattacataacagaaatcaataagatatgtgccctcatcataaatatcatctctagcactgccatccaatttagttcaataaaattcaaatataagtttccatgcttttttgtaacatcaaagaaaacatacccatcagtaatttctctaatactgacctttctattctctattaataaaaaattaatacatacaattattcaattctattatattaaaataagttaaagtttataaccactagtctggtcagttaatgtagaaatttaaatagtaaataaaacacaacataatcaaagacaactcactcaggcatcttctttctctaaataccagaatctagtatgtaattgttttcaacactgtccttaaagactaacttgaaagcaggcacagtttgatgaagggctagagagctgtttgcaataaaaagtcaggtttttttcctgatttgaagaagcaggaaaagctgacacccagacaatcacttaagaaaccccttattgatgtatttcatggcactgcaaaggaagaggaatattaattgtatacttagcaagaaaattttttttttctgatagcactttgaggatattagatacatgctaaatatgttttctacaaagacttacgtcatttaatgagcctggggttctggtgttagaatatttttaagtaggctttactgagagaaactaaatattggcatacgttatcagcaacttcccctgttcaatagtatgggaaaaataagatgactgggaaaaagacacacccacaccgtagaacatatattaatctactggcgaatgggaaaggagaccattttcttagaaagcaaataaacttgatttttttaaatctaaaatttacattaatgagtgcaaaataacacataaaatgaaaattcacacatcacatttttctggaaaacagacggattttacttctggagacatggcatacggttactgacttatgagctaccaaaactaaattctttctctgctattaactggctagaagacattcatctatttttcaaatgttctttcaaaacatttttataagtaatgtttgtatctatttcatgctttactgtctatatactaataaagaaatgttttaataccgaaaaaaaaaaaaaaaa

SEQ ID NO: 40 - DNA, 837 bp, Homo sapiens
cgtaaaaccgacactaaaacgtccctgcctacaaatcatccggccaaattatgagttcattgtattatgcgaatgctttattttctaaatatccagcctcaagttcggttttcgctaccggagccttcccagaacaaacttcttgtgcgtttgcttccaacccccagcgcccgggctatggagcgggttcgggcgcttccttcgccgcctcgatgcagggcttgtaccccggcggggggggcatggcgggccagagcgcggccggcgtctacgcggccggctatgggctcgagccgagttccttcaacatgcactgcgcgccctttgagcagaacctctccggggtgtgtcccggcgactccgccaaggcggcgggcgccaaggagcagagggactcggacttggcggccgagagtaacttccggatctacccctggatgcgaagctcaggaactgaccgcaaacgaggccgccagacctacacccgctaccagaccctggagctggagaaagaatttcactacaatcgctacctgacgcggcggcggcgcatcgagatcgcgcacacgctctgcctcacggaaagacagatcaagatttggtttcagaaccggcgcatgaagtggaaaaaggagaacaagaccgcgggcccggggaccaccggccaagacagggctgaagcagaggaggaagaggaagagtgagggatggagaaagggcagaggaagagacatgagaaagggagaggaagagaagcccagctctgggaactgaatcaggaaactcaaatcgaatagggaagtaaaaaaacaaaacaaaaaacaaaaaaaaaaaaaa

SEQ ID NO: 41 - DNA, 3512 bp, Homo sapiens
gacatggcgagtgtagtgctgccgagcggatcccagtgtgcggcggcagcggcggcggcggcgcctcccgggctccggctccggcttctgctgttgctcttctccgccgcggcactgatccccacaggtgatgggcagaatctgtttacgaaagacgtgacagtgatcgagggagaggttgcgaccatcagttgccaagtcaataagagtgacgactctgtgattcagctactgaatcccaacaggcagaccatttatttcagggacttcaggcctttgaaggacagcaggtttcagttgctgaatttttctagcagtgaactcaaagtatcattgacaaacgtctcaatttctgatgaaggaagatacttttgccagctctataccgatcccccacaggaaagttacaccaccatcacagtcctggtcccaccacgtaatctgatgatcgatatccagagagacactgcggtggaaggtgaggagattgaagtcaactgcactgctatggccagcaagccagccacgactatcaggtggttcaaagggaacacagagctaaaaggcaaatcggaggtggaagagtggtcagacatgtacactgtgaccagtcagctgatgctgaaggtgcacaaggaggacgatggggtcccagtgatctgccaggtggagcaccctgcggtcactggaaacctgcagacccagcggtatctagaagtacagtataagccacaagtgcacattcagatgacttatcctctacaaggcttaacccgggaaggggacgcgcttgagttaacatgtgaagccatcgggaagccccagcctgtgatggtaacttgggtgagagtcgatgatgaaatgcctcaacacgccgtactgtctgggcccaacctgttcatcaataacctaaacaaaacagataatggtacataccgctgtgaagcttcaaacatagtggggaaagctcactcggattatatgctgtatgtatacgatccccccacaactatccctcctcccacaacaaccaccaccaccaccaccaccaccaccaccaccatccttaccatcatcacagattcccgagcaggtgaagaaggctcgatcagggcagtggatcatgccgtgatcggtggcgtcgtggcggtggtggtgttcgccatgctgtgcttgctcatcattctggggcgctattttgccagacataaaggtacatacttcactcatgaagccaaaggagccgatgacgcagcagacgcagacacagctataatcaatgcagaaggaggacagaacaactccgaagaaaagaaagagtacttcatctagatcagcctttttgtttcaatgaggtgtccaactggccctatttagatgataaagagacagtgatattggaacttgcgagaaattcgtgtgtttttttatgaatgggtggaaaggtgtgagactgggaaggcttgggatttgctgtgtaaaaaaaaaaaaaaatgttctttggaaagtacactctgctgtttgacacctcttttttcgtttgtttgtttgtttaatttttatttcttcctaccaagtcaaacttggatacttggatttagtttcagtagattgcagaaaattctgtgccttgttttttgtttgtttgttgcgttcctttcttttccccctttgtgcacatttatttcctccctctaccccaatttcggattttttccaaaatctcccattttggaatttgcctgctgggattccttagactcttttccttcccttttctgttctagttttttacttttgtttatttttatggtaactgctttctgttccaaattcagtttcataaaaggagaaccagcacagcttaggatttcatagttcagaatttagtgtatccataatgcattcttctctgttgtcgtaaagatttgggtgaacaaacaatgaaaactctttgctgctgcccatgtttcaaatacttagagcagtgaagactagaaaattagactgtgattcagaaaatgttctgtttgctgtggaactacattactgtacagggttatctgcaagtgaggtgtgtcacaatgagattgaatttcactgtctttaattctgtatctgtagacggctcagtatagataccctacgctgtccagaaaggtttggggcagaaaggactcctcctttttccatgccctaaacagacctgacaggtgaggtctgttccttttatataagtggacaaattttgagttgccacaggaggggaagtagggaggggggaaatacagttctgctctggttgtttctgttccaaatgattccatccacctttcccaatcggccttacttctcactaatttgtaggaaaaagcaagttcgtctgttgtgcgaatgactgaatgggacagagttgattttttttttttttttcctttgtgcttagttaggaaggcagtaggatgtggcctgcatgtactgtatattacagatatttgtcatgctgggatttccaactcgaatctgtgtgaaactttcattccttcagatttggcttgacaaaggcaggaggtacaaaagaagggctggtattgttctcacactggtctgctgtcgctctcagttctcgataggtcagagcagaggtggaaaaacagcatgtacggattttcagttacttaatcaaaactcaaatgtgagtgtttttatctttttacctttcatacactagccttggcctctttcctcagccttaagaaccatctgccaaaaattactgatcctcgcatgatggcagccatagtgcatagctactaaaatcagtgaccttgaacatatcttagatggggagcctcgggaaaaggtagaggagtcacgttaccatttacatgttttaaagaaagaagtgtggggattttcactgaaacgtctaggaaatctagaagtagtcctgaaggacagaaactaaactcttaccatatgtttggtaagactccagactccagctaacagtccctatggaaagatggcatcaaaaaagatagatctatatatatatataaatatatattctattacattttcagtgagtaattttggattttgcaaggtgcatttttactattgttacattatgtggaaaacttatgctgatttatttaagggggaaaaagtgtcaactctttgttatttgaaaacatgtttatttttcttgtctttattttaacctttgatagaaccattgcaatatgggggccttttgggaacggactggtatgtaaaagaaaatccattatcgagcagcattttatttacccctcccctatccctaggcacttaaccaagacaaaaagccacaatgaacatccctttttcaatgaattttataatctgcagctctattccgagcccttagcacccattccgaccatagtataatcatatcaaagggtgagaatcatttagcatgttgttgaaaggttttttttcagttgttctttttagaaaaaaag

SEQ ID NO: 42 - DNA, 4205 bp, Homo sapiens
gaagcgggctgggaggcgtcggcggcggcagcgcacgtggtgacgtgcgagggggtgcggcgcgagcggtcggcggcggcggaggcagtgtctcccggtcgcgcgtggaggtcggtcgctcagagctgctgggcgcagtttctccgcctgctgcttcggcgcggctgtatcggcgagcgagcgagttcccgcgagttctcggtggcgctcccccttcctttcagtctccacggactggcccctcgtccttctacttgaccgctcccgtcttccgccgccttctggcgctttccgttgggccgattcccgcccgcttcctcctgcttcccatcgaagctctagaaatgaatgtttccatctcttcagagatgaaccagattatgatgcatcattatcacagaagaaattcgtgtctatagcttttaaggacttgattacatcattttcaagcctgatagttttggaatcaccattagagcttaagacacacctgccttcatttcaaccacctgtcttcataccctgacgaagtgcaccttttaacactcctttgtccttggattacttaagagttcccagaaatacatttgccaccaacagagtagccaaatttataaggaaaaatgattcccaatggatatttgatgtttgaggatgaaaattttattgagtcttctgttgccaaattaaatgccctgaggaaaagtggccagttctgtgatgttcgacttcaggtctgtggccatgaaatgttagcacacagagcagtgctagcttgctgcagtccctatttatttgaaatctttaatagtgatagtgatcctcatggaatttctcacgttaaatttgatgatctcaatccagaagctgttgaagtcttgttgaattatgcctacactgctcagttgaaagcagataaggaattggtaaaagatgtttattctgcagcaaaaaagctgaagatggatcgagtaaagcaggtttgtggtgattatttactgtctagaatggatgttaccagctgcatctcttaccgaaattttgcaagttgtatgggagactcccgtttgttgaataaggttgatgcttatattcaggagcatttgttacaaatttctgaagaggaggagtttcttaagcttccaaggctaaagttggaggtaatgcttgaagataatgtttgcttgcccagcaatggcaaattatatacaaaggtaatcaactgggtgcagcgtagcatctgggagaatggagacagtctggaagagctgatggaagaggttcaaaccttgtactactcagctgatcacaagctgcttgatgggaacctactagatggacaggctgaggtgtttggcagtgatgatgaccacattcagtttgtgcagaaaaagccaccacgtgagaatggccataagcagataagtagcagttcaactggatgtctctcttctccaaatgctacagtacaaagccctaagcatgagtggaaaatcgttgcttcagaaaagacttcaaataacacttacttgtgcctggctgtgctggatggtatattctgtgtcatttttcttcatgggagaaacagcccacagagctcaccaacaagtactccaaaactaagtaagagtttaagctttgagatgcaacaagatgagctaatcgaaaagcccatgtctcctatgcagtacgcacgatctggtctgggaacagcagagatgaatggcaaactcatagctgcaggtggctataacagagaggaatgtcttcgaacagtcgaatgctataatccacatacagatcactggtcctttcttgctcccatgagaacaccaagagcccgatttcaaatggctgtactcatgggccagctctatgtggtaggtggatcaaatggccactcagatgacctgagttgtggagagatgtatgattcaaacatagatgactggattcctgttccagaattgagaactaaccgttgtaatgcaggagtgtgtgctctgaatggaaagttatacatcgttggtggctctgatccatatggtcaaaaaggactgaaaaattgtgatgtatttgatcctgtaacaaagttgtggacaagctgtgcccctcttaacattcggagacaccagtctgcagtctgtgagcttggtggttatttgtacataatcggaggtgcagaatcttggaattgtctgaacacagtagaacgatacaatcctgaaaataatacctggactttaattgcacccatgaatgtggctaggcgaggagctggagtggctgttcttaatggaaaactgtttgtatgtggtggctttgatggttctcatgccatcagttgtgtggaaatgtatgatccaactagaaatgaatggaagatgatgggaaatatgacttcaccaaggagcaatgctgggattgcaactgtagggaacaccatttatgcagtgggaggattcgatggcaatgaatttctgaatacggtggaagtctataaccttgagtcaaatgaatggagcccctatacaaagattttccagttttaacaaatttaagaccctctcaaactaacaggcttagtgatgtaattatggttagtagaggtacacttgtgaataaagagggtgggtgggtatagatgttgctaacagcaacacaaagcttttgcatattgcatactattaaacatgctgtacatactttttgggtttatttggaaaggaatgcaaagatgaaggtctgttttgtgtacttttaagactttggttattttactttttggaaaagaataaaccaagaattgattgggcacatcatttcaagaagtcccctctcctccacatttgttttgccaatttgcacattaaatgactcttccctcaaatgtgtactatggggtaaaaggggtagggtttaaagatgtagacagttgggttttttaagggccctttttcaataactggaacactctataacaaaggatacttatttaaatagatgacattgactatttttgtttttattaaaaggaagcttacatgcctaccaatatttaatcttttatgattgcctttttataactttttatattctcagcagagtgctttaccaattgaagtaaaatgtggcaggctggagttattgaagcagagtggcagtcttcagtttgcagagtaggggtctgtcttttaaactctgagtgcaaacttcagagttcttgccttggctgcagtttttttccttcaagaatgcagtactaacatttatttgagtggagttactgaacagtaacatagctgtgatttttggtatttgaaacactggttttaaatattttgacttgttgagggtatgttttatatagcaagacattatatagcagtaaaaaatggtgttttatcttctatataattcctgtttttattattaacaaaacagtcctaaatagcagccctcaattgtgaaaaaatttactttaaactacattaggttgtgaatgcaggttttatcagaactatgtttttgttcagtttatctgttcatatggataaatattggttgggatgacttggtgtctaatgtgtagtgctacacacctaacttatggggccaaaatagcatgtcctaatgcttgctgctgatttaaacacattaaaggtactttgcaggaaatccttgcaccatgggattaatatccaattgctgcttgtacactcattcattactaaaagttttgagaaatttttttttccagtaatgagcttaagaaatttgtggaaaataactcacctggcatcttacatctgaaataaggaatgatataaggtttttttttctcacagaagatgaagcacacaggaacctaatgggccaactgggatgaggtgactattctgagatgactattcagtggctaacttgggttaggaagaaaataattaggtattttctccaaatgttcactggtactctgccactttatttctctcatctgttacacaaagaaccaccaggaaagcaaatcagtttggttggtaactctgtaattcctaactatcactggtttggttctggactaaaactacattgacagattgaatttgcctaatatgatgactgtttttaatatggatctgtatgtgttctattcagcacaaggaaataaaattttagttgaggattcagcactaaaaaaaaaa

SEQ ID NO: 43 - DNA, 3796 bp, Homo sapiens
gcatactgctagtggcgcgcggaggagcgacgcgtggagaagcggcccacgtgtctgcccagagtcaagtcctgtgttcttcccgctccttacgcatccgcggtccagggcgccctttcagccccgctggtgttcgcccaccccgggccgcgtgagtggggccccacgcagctccccgcactccgtgggccaacttggccaagcaactctgtccggggagcggtgcttgcggggggtgagtaccgggcactgcgcatgcggagctccaaattcaaacagctgttttcagaggctggagggcgggcggactggtagcagctggggctaggagaggctttctctaggaggcggccgctcgggagccatggtggaccggggccctctgctcacctcggccatcatcttctacctggccatcggggcggcgatcttcgaagtgctggaggagccacactggaaggaggccaagaaaaactactacacacagaagctgcatctgctcaaggagttcccgtgcctgggtcaggagggcctggacaagatcctagaggtggtatctgatgctgcaggacagggtgtggccatcacagggaaccagaccttcaacaactggaactggcccaatgcaatgatttttgcagcgaccgtcattaccaccattggatatggcaatgtggctcccaagacccccgccggtcgcctcttctgtgttttctatggtctcttcggggtgccgctctgcctgacgtggatcagtgccctgggcaagttcttcgggggacgtgccaagagactagggcagttccttaccaagagaggtgtgagtctgcggaaggcgcagatcacgtgcacagtcatcttcatcgtgtggggcgtcctagtccacctggtgatcccacccttcgtattcatggtgactgaggggtggaactacatcgagggcctctactactccttcatcaccatctccaccatcggcttcggtgactttgtggccggtgtgaaccccagcgccaactaccacgccctgtaccgctacttcgtggagctctggatctacttggggctggcctggctgtccctttttgtcaactggaaggtgagcatgtttgtggaagtccacaaagccattaagaagcggcggcggcgacggaaggagtcctttgagagctccccacactcccggaaggccctgcaggtgaaggggagcacagcctccaaggacgtcaacatcttcagctttctttccaagaaggaagagacctacaacgacctcatcaagcagatcgggaagaaggccatgaagacaagcgggggtggggagacgggcccgggcccagggctggggcctcaaggcggtgggctcccagcactgcccccttccctggtgcccctggtagtctactccaagaaccgggtgcccaccttggaagaggtgtcacagacactgaggagcaaaggccacgtatcaaggtccccagatgaggaggctgtggcacgggcccctgaagacagctcccctgcccccgaggtgttcatgaaccagctggaccgcatcagcgaggaatgcgagccatgggacgcccaggactaccacccactcatcttccaggacgccagcatcaccttcgtgaacacggaggctggcctctcagacgaggagacctccaagtcctcgctagaggacaacttggcaggggaggagagcccccagcagggggctgaagccaaggcgcccctgaacatgggcgagttcccctcctcctccgagtccaccttcaccagcactgagtctgagctctctgtgccttacgaacagctgatgaatgagtacaacaaggctaacagccccaagggcacatgaggcagggccggctccccaccccacctttgatggcctcttcccccctcaccctagggtgtcccgagatgaccgggacgcctggcccctggtgggggggcagcctcggaactgggagtggggggccaggggccttcctaaccttccatcatcctcagctagatgtatgcccgggacagggcctctgttctccagctgaaccataccctggctgtgggggcatctgtcctgagcttggctggtgtatctcacaatgcaaagacatgctggctggcgggacaggtgggcaggactgaccctgaggaggccttgcctgcagggtctttgtctcaccatttggtggagtatcacacggttctctgaggtctggggcctcagctgtttaagtttaccggtattactgagctcggcatttggagagggagctctgaagtgtctggggaggtaccgctgtgcgtggggtcaggtgtttccgtaccacagcaggagcagggcccgcccgcatcccagctgtgggcctgccggtcaggtcgggcacctactacaaaccgtagtggggtggaggctgctggaggtgggagtgaggagatgagggcagggtctcaaacagtcctgactcacagggcctggaaacaagtcctatgtgggcctggggcctggggtcctcatcctccttgttggtctactcaggcccagcccagagctgtgttccctgtctcaggtcaagcagtggcagacgcaaggctttctgtgggcccccaagtggtaggagggagagtagcagagcatgggttactggaagccgggactgctagggctggtggccagggagctgcaagagtgaggctcagctctggctggttctgcccttacccctcctgcccgcctgagaactgcacaccctgcccgctggccccaggacctgcactcccaatcctgctgtcttctccttccctgtgccctgaacaaggacctcactgcccgccttcccctcccaccagcccccttgggccaggcagggtgaggccaaattgctcttggcccacaaatgggtgatggtcagatatgtgaatcaagctcctttctctagctagtgtttgatgtgcacgtgtgtgtgcacagtgcgtgtgtgcacacgcacacctgtgcactcgtgtgtgtttaagaaaggaaaggatttgggctggggagcaaaagataatgtgaaactgttggtggactctctggtgaggggtgggcagaacttgctgctactagagttcttgggttctccatgatgttcaccctggggctggcccactgtgtcctgaatgtttttgttattttttgttttattttttaaacaaactgctgtttttatatacctggaatctgttgttggcttcagagccagtggttaaagagcagggtcccaaggattgggagatctagtgtctgccctcctgccctgcaactcaattgggcctttttcggtgacctcatccaaggccatgatgtcaagggccatgtccccaagcagaggtggagaaggggacactgaggtgagcaaaagcaggaaggggcatccactgcgggtgactggaggccgggcaggaagcaagtcatcagagccgctcagctccgttcactctctgccttctgccccactactgtggggcagtggggccagagcccacctccccaacatgtgaagacagtgatgggcacgtgcccacacccccacttctctagccgtttgcagaggccgccacccagcaggggcctgaaaaggagctgcctcgtatttttctgtgaaatgttttaatgaaccatgttgttgctggttgtcctggcatcgcgcacactgtatgtacatactggcaacgatgtcaaatgtaatttattttaacatttttacaataaaacatgaggtggacaggcaaaaaaaaaaaaaaa

SEQ ID NO: 44 - DNA, 5492 bp, Homo sapiens
tgagggctttgctatgacctcagtcccctcacggagccacgactgccccttgctgccacagcctttccaagaccctgcccggccctgccccatcctcagccccgagtcaccatgggcagcgtcagtagcctcatctccggccacagcttccacagcaagcactgccgggcttcgcagtacaagctgcgcaagtcctcccacctcaagaagctcaaccggtattccgacgggctgctgaggtttggcttctcccaggactccggtcacggcaagtccagctccaaaatgggcaagagcgaagacttcttctacatcaaggtcagccagaaagcccggggctcccatcacccagattacacggcactgtccagcggggatttagggggccaggctggggtggactttgacccgtccacaccccccaagctcatgcccttctccaatcagctagaaatgggctccgagaagggtgcagtgaggcccacagccttcaagcctgtgctgccacggtcaggagccatcctgcactcctccccggagagtgccagccaccagctgcaccccgcccctccagacaagcccaaggagcaggagctgaagcctggcctgtgctctggggcgctgtcagactccggccggaactccatgtccagcctgcccacacacagcaccagcagcagctaccagctggacccgctggtcacacccgtgggacccacaagccgttttgggggctccgcccacaacatcacccagggcatcgtcctccaggacagcaacatgatgagcctgaaggctctgtccttctccgacggaggtagcaagctgggccactcgaacaaggcagacaagggcccctcgtgtgtccgctcccccatctccacggacgagtgcagcatccaggagctggagcagaagctgttggagagggagggcgccctccagaagctgcagcgcagctttgaggagaaggagcttgcctccagcctggcctacgaggagcggccgcggcgctgcagggacgagctggagggcccggagcccaaaggcggcaacaagctcaagcaggcctcgcagaagagccagcgcgcgcagcaggtcctgcacctgcaggtactgcagcttcagcaggagaagcggcagctccggcaggagctcgagagcctcatgaaggagcaggacctgctggagaccaagctcaggtcctacgagagggagaagaccagcttcggccccgcgctggaggagacccagtgggaggtgtgccagaagtcaggcgagatctccctcctgaagcagcagctgaaggagtcccagacggaggtgaacgccaaggctagcgagatcctgggtctcaaggcacagctgaaggacacgcggggcaagctggagggcctggagctgaggacccaggacctggagggcgccctgcgcaccaagggcctggagctggaggtctgtgagaatgagctgcagcgcaagaagaacgaggcggagctgctgcgggagaaggtgaacctgctggagcaggagctgcaggagctgcgggcccaggccgccctggcccgcgacatggggccgcccaccttccccgaggacgtccctgccctgcagcgggagctggagcggctgcgggccgagctgcgggaggagcggcaaggccatgaccagatgtcctcgggcttccagcatgagcggctcgtgtggaaggaggagaaggagaaggtgattcagtaccagaaacagctgcagcagagctacgtggccatgtaccagcggaaccagcgcctggagaaggccctgcagcagctggcacgtggggacagcgccggggagcccttggaggttgacctggaaggggctgacatcccctacgaggacatcatagccactgagatctgaggggctgcctgggaaggcgagtctggggacctggcactgggaggcagggctctcccgtgcatcccccctgctcagcaattcagacccctctgagagacgccactccctgggacacagacccaggacccccgaggggagggcaggatggcctttccttccctctctgatgtcccagtgctcaccagccctgcagcccaccagacgtcaggccctgactcctctggctttcccaggagatgggtccaggggtctgtctgctttggttaagggctccctaaactttggcctttgttcgaaatagatatcctctccccctcctccagggaaggtggccacagcaagaacagcggctcccctccgcttctcatcccaacctctttttcctcctggacacattggaatgccttggaaatagaaagaagccatatatgaccagaagccttggaaccagccccatcagaacctgagctattttcctctggccgcagaggtgtaggggtggaatgagccgcggggaagctggctttgaaacctcagggctgtcccagccccggcaagccacaggaaggaggggagagacaggcagcccagcagtgtggagaccctgccacagccagaggagggcagagggagaatccaagggttgagagccagtggcgggtgatggccagcccctggggcccagcccctgtttactggttcttgcaaatgggagctgagcagcctctggacagccagtgacctttgacctcggtgaccactcttctttaagccatagaccctgaggccctgggctgggtgctgggaagggagggttgaaaccaccgtgaaccagagggtgtggctttccaggcaccctcagggagcctccccatctgtccagctggggccagaggctgggagtccctacctgcttcacgttggccggcggctactctggaatgtttttccctccccagaatcaagcttttgcttgatccagaagagcccatatcactaagatggcatatatgtgatctgggcattttcctcctctgcctacagccaggtttagcggcaaacctttcccccttagcaccttcagggctgagttctgggtttctagaggtcaggacggctcctcagagcgccaggaagccagagccccaagcaggacgaaaaagaggcatacacacagcagtgtgaatagcctggccaccagccatcctccctccacctcaagacccccatttgtcccagactaaaggatccagagagcagctccctttctcaggagcttgggcagtgccccagggagtccagggtttctctgcagatgtgcggagcgggaggcggtggtagagagagataaaaggtggagtttctctgttgtttggttcagggattttatttttaattttatgagacagggtcttgctctgtcccccaggctggagtgcagtggcatgatcatagctcactgcagcctcatactcctgggctcaagcaatcctcctgcctcagccttccaactagctgggactacaggtgcgcgccaccgtgcctggctaacttttcattttttttgtagggacggggtctcgttttgttgccaaagctggtctcaaacttgtggcctcaagcaatccacctgccttggcctcccaaagtgctgagattgcagatgtgagccaccgtgcctggccagatttttcttttattcttctttctttttcttttttgctttcttgtcttttcagaagcaagccagacctagcaggctgttccatgttctatttttgactgtagccacagctgctgttctcaggacagcatcccttcccacatgcctgcgcctgctgcctgctgagatgaggaggggagcgtctgggaacttgcgagtccaaggccagtccccatttctgcctcgctcaccgctggcccttagagaccccgaggtaggggtggggagatgcttctctccttgccccccgccctcatgggtcctagcccttccctgagtgcgggctgaggccagagtcaccttttctgtggctggctctaccttcctgtccctgaggttaaacggtgcccatcctgccatcctcaaacgacagaggagcttttctggaatttcaaaccattgctcttagtcccaagctaggcttaaacctggaatctacaagccaaaagtccctccctgcctgagggcagtaccctccattgggcacagtccagacccaagtcaaagatgccccattccttgcgcctcagccctcagttccttcatttccaccaggccgtgccttgtttgagtttttcctcccagtgagactgccccacggagacagaggaaagggctggctccccctccccaggctggagaccccccccaactccaggaaagagcagtcagagtccagtgctctgcctcagacgttgcctgagaagaagtggctgccacacccaggggaaggccctgaggcggaggctgtgctccgccatggtgtcccggtaccttccatacacagaggagtgcagccttctccatatctccatggccctgtcccaggccggcccagatgtgtcccccccaggccttgtcctacgtccaaggtggcagatgtcttccctgggctgccaccagcccccgccccagagtggcccaccgtggcactagaatgcaagtatcctgcgaccttgcaacctcaccttcctgtgggtgttctttcctgccctgtccaaaagcgccctcactattcttggaccatgccagattctgcctctctggaaagaggctctggacagcagaagcctccaagcacagagcctggccccaggccccagacagggtgggcttcctgcccttccctctgggcacgcctgctggccgacccactgacccactcggatggaccaacctgctctgtccccaaaggacgcctgcaggagagagcagcactccgcatcacctcaccaaggatcggactctgcccctggacctgggaacgactggactgtcacggggttccctcctagctctcccagtgaactcctgccaggcacacacagcccctatagcactgagctcacatgggactgggatatgggggcatctcttccccagagaggcactcagtgagcctcctgtgcctggccccagtctgggccatctcttaggtgagacagttgcccgaaactaagccaggcctggctggaggagcagcagcttggggagagggatttccctgcagacctcaagccatcatgcggtgggtgctgccatgacagaggctgcacccctgggccagcggggctgctcacccacctcttgtgcaaggtggcctttgtgctgcgcctgcaggcagagctggagcccccagcagaggcaggctgggacggaccagcatctggaagatgtacatagttatttttctctttgtggtttcttgtttggtttggtttgcttttgacagcttcattttatttttgacgtcactttttggccatgtaaactatttgtggcaattttatgtttttatttatgaataaagaatgccatttctcacgccctctaaaaaaaaaaaaaaaaaaaaaaaaaaaaaaaaaaa

SEQ ID NO: 45 - DNA, 1678 bp, Homo sapiens
gctccgagtggcggttgtttcaagatggcggacgtggcgggcccctcccgccccagtgccgcggcgttctggagccgggacttttctgatgaagaacaatcagtagtatacgttccaggaatttctgctgaaggaaatgtcagatcaagacacaagctgatgagtccaaaagctgatgttaaacttaagacttccagggtgactgatgcttcaatctccatggagtccttaaaaggcacaggagattcagtagatgaacagaattcctgcaggggagaaataaagagtgcatcattgaaggatttatgtcttgaagacaaaagacgcattgcaaacttaattaaagaactggccagagtaagtgaggaaaaggaagtgacagaggaaagactgaaagctgagcaggagtcatttgagaagaagatcaggcagttggaagaacagaatgaactgatcatcaaagaaagggaagatatccttttgaaagttctcttttttaacgttcaagaagtttgactatttctttttttttttgagacgaaatctcgctcttgtcgcctaggctgcagtgcaatggtgcgatttcagttcaccgcaacctccacctcccggttcaagcgattctcctaccccagctactcgggaggttgaggcaggagaatcgcttaaacccaggcggcagaggttgcagtgagccaagatcgcgccactgcactccagcctcagcaatagagtgagactgtctcaaaaaaaaaaaaaaaaaaaacctgccaattttcaaacataccgtagagattattttcaggtgccattttatagtatagcagcagggcttttactctgtgtatgcacagatgcagtctggggcatggtttgtgtgctggactttctcatggccatcatcagtatgcttatggatttgatgacaggcatagcctgggcatatcacctcattggtaaagggctagagcctttcttttttatggcacttctttttttgagatagggtcttactctgtcaccctggctagagtacactggtacaatcacggctcaatgtaggcttaacctcctgggctcaggtgtatgtcactatgcccggctactttttgtattttttggtagagacggcttcgccacgttgcccaggctgcaagcgatatgcctaggctcaagcgatctgcccacctcaacttccggaagtgctgagattacaggtgtgagccactgcacccagcctttgttttattttttattttttgagaggtatgattctttctagagattttttctcatggctactattagatcaggaatgggtgattggagattattagattctaggttaacttctaccactttaccctaatacataaaactttttcctaaataaatgatggaaggaataatacttggttacctggcattatttttcagtaagaaaaaagctttactaaccactacatttatggaaatttgtaggggtaagtattttataggtcataaaaaacaccataatataacgaatctcattttctttaaatgtgaattaaatcctaacagtcatctttataaaatgaccataggctaaaatcttacgtgtaagtactactacaataaataatttctgaaacctttaaaaaaaaaaaaaaaaaaaaaagaaaaaaaaaaaaaaaaa

SEQ ID NO: 46 - DNA, 3700 bp, Homo sapiens
tggaggccggggcgggacgcgttgtgcagcgggtaagcgcacggccgagcgagcatggagggggaccgggtggccgggcggccggtgctgtcgtcgttaccagtgctactgctgctgcagttgctaatgttgcgggccgcggcgctgcacccagacgagctcttcccacacggggagtcgtggggggaccagctcctgcaggaaggcgacgacgaaagctcagccgtggtgaagctggcgaatcccctgcacttctacgaagcccgattcagcaacctctacgtgggcaccaacggcatcatctccactcaggacttccccagggaaacgcagtatgtggactatgatttccccaccgacttcccggccatcgccccttttctggcggacatcgacacgagccacggcagaggccgagtcctgtaccgagtgaatgggaaagtgagtggccacctccacgtgggccatacacccgtgcacttcactgatgtggacctgcatgcgtatatcgtgggcaatgatggcagagcctacacggccatcagccacatcccacagccagcagcccaggccctcctccccctcacaccaattggaggcctgtttggctggctctttgctttagaaaaacctggctctgagaacggcttcagcctcgcaggtgctgcctttacccatgacatggaagttacattctacccgggagaggagacggttcgtatcactcaaactgctgagggacttgacccagagaactacctgagcattaagaccaacattcaaggccaggtgccttacgtcccagcaaatttcacagcccacatctctccctacaaggagctgtaccactactccgactccactgtgacctctacaagttccagagactactctctgacttttggtgcaatcaaccaaacatggtcctaccgcatccaccagaacatcacttaccaggtgtgcaggcatgcccccagacacccgtccttccccaccacccagcagctgaacgtggaccgggtctttgccttgtataatgacgaagaaagagtgcttagatttgctgtgaccaatcaaattggcccggtcaaagaagattcagaccccactccggtgaatccttgctatgatgggagccacatgtgtgacacaacagcacggtgccatccagggacaggtgtagattacacctgtgagtgcgcatctgggtaccagggagatggacggaactgtgtggatgaaaatgaatgtgcaactggctttcatcgctgtggccccaactctgtatgtatcaacttgcctggaagctacaggtgtgagtgccggagtgcttatgagtttgcagatgaccggcatacttgcatcttgatcaccccacctgccaacccctgtgaggatggcagtcatacctgtgctcctgctgggcaggcccggtgtgttcaccatggaggcagcacgttcagctgtgcctgcctgcctggttatgccggcgatgggcaccagtgcactgatgtagatgaatgctcagaaaacagatgtcaccctgcagctacctgctacaatactcctggttccttctcctgccgttgtcaacccggatattatggggatggatttcagtgcatacctgactccacctcaagcctgacaccctgtgaacaacagcagcgccatgcccaggcccagtatgcctaccctggggcccggttccacatcccccaatgcgacgagcagggcaacttcctgcccctacagtgtcatggcagcactggtttctgctggtgcgtggaccctgatggtcatgaagttcctggtacccagactccacctggctccaccccgcctcactgtggaccatcaccagagcccacccagaggcccccgaccatctgtgagcgctggagggaaaacctgctggagcactacggtggcaccccccgggatgaccagtacgtgccccagtgcgatgacctgggccacttcatccccctgcagtgccacggaaagagcgacttctgctggtgtgtggacaaagatggcagagaggtgcagggcacccgctcccagccaggcaccacccctgcgtgtatacccaccgtcgctccacccatggtccggcccacgccccggccagatgtgacccctccatctgtgggcaccttcctgctctatactcagggccagcagattggctacttacccctcaatggcaccaggcttcagaaggatgcagctaagaccctgctgtctctgcatggctccataatcgtgggaattgattacgactgccgggagaggatggtgtactggacagatgttgctggacggacaatcagccgtgccggtctggaactgggagcagagcctgagacgatcgtgaattcaggtctgataagccctgaaggacttgccatagaccacatccgcagaacaatgtactggacggacagtgtcctggataagatagagagcgccctgctggatggctctgagcgcaaggtcctcttctacacagatctggtgaatccccgtgccatcgctgtggatccaatccgaggcaacttgtactggacagactggaatagagaagctcctaaaattgaaacgtcatctttagatggagaaaacagaagaattctgatcaatacagacattggattgcccaatggcttaacctttgaccctttctctaaactgctctgctgggcagatgcaggaaccaaaaaactggagtgtacactacctgatggaactggacggcgtgtcattcaaaacaacctcaagtaccccttcagcatcgtaagctatgcagatcacttctaccacacagactggaggagggatggtgttgtatcagtaaataaacatagtggccagtttactgatgagtatctcccagaacaacgatctcacctctacgggataactgcagtctacccctactgcccaacaggaagaaagtaagtacagtaatgtaaaggaagacttggagtttacaatcagaacctggaccctaaagaacagtgactgcaaaggcaaagaaagtaaaaaaggaattggccattagacgttcctgagcatccaagatgaacattttgtagtgcaaaaagacttttgtgaaaagctgatacctcaatctttactactgtatttttaaaaatgaaggttgttattgcaagtttaaaaaggtaacagaattttaactgttgcttattaaagcaacttcttgtaaacatttatcattaatatttaaaagatcaaattcattcaactaagaattagagtttaagactctaaacctgatttttgccatggattccttctggccaagaaattaaagcacatgtgatcaatataacaatataatcctaaaccttgacagttggagaagccaatgcagaactgatgggaaaggaccaattatttatagtttcccaacaaaagttctaagattttttacctctgcatcagtgcatttctatttatatcaaaaggtgctaaaatgattcaatttgcattttctgatcctgtagtgcctctatagaagtacccacagaaagtaaagtatcacatttataaataccaaagatgtaacaattttaaaattttctagattactccaataaagtgttttaagttttcctatgaaaaaaaaaaaaaaaaaaaaaaaaaaaaaaaaaaaaaaaaaaaaaaaaaaaaa

SEQ ID NO: 47 - DNA, 3240 bp, Homo sapiens
gcccgcgccgccaccgcctcttccctccccgtgtccggtccccgtgcgtcccgaggctccccgccgcccgtcccggcgcgcaccgcgggcgtctgtccgaacgccttccagccacctgagccctcctgcgggcgactcgctcagctagcccgtgcccgcctccaccttctccgtcatcccctcttccttgcgtccggctctccactggggctgcacagtcgagggctgctcgcgtcgggaaggagatgcccagagtctctggggcgcaccctcccgtcccgctcagccgcacccagctttagaaggtgctctcagcagccactttcgggctctagcgaggacaccctctcgcagaagtccttgccgagaccccccgccccagccattctctgaaggggctgaggacactcttatcgcgcccctcatggccaagcctcggctgctagttctctacttcgctctgattgtggttccggcctgggtgtccagcattgtcctcacagggacaagcgagcccccagatgcgcagacagtggcgcctgcggaggacgagactctgcaaaacgaggcggacaaccaggagaacgttttatctcagttgctgggggactatgacaaggtcaaggctatgtctgagggctcggactgtcagtgcaagtgtgtggtgagacccctgggccgggatgcctgccagaggatcaatgcgggggcctccaggaaggaagacttctataccgtggaaaccatcacctcaggctcgtcgtgcaagtgtgcctgtgtagcacccccatcggccctcaatccctgcgagggagacttcaggctccagaagctgcgggaggcagacagccaggacttgaagctctccacaatcatagacatgttggaaggagcgttctatggcctggatctcctgaagctacattcagtcaccaccaaactggtggggcgagtggataaactggaggaggaagtgtctaaaaacctcaccaaggaaaacgaacaaatcaaagaggacatggaagaaattcgaaccgagatgaataagcgaggcaaagaaaattgctctgaaaacatcctagatagcatgccagacatccgctcagccctgcagagggatgcagcagcagcctacgcccacccagagtatgaagagcggtttctgcaggaagaaaccgtgtcccagcagatcaactccatcgaacttctgcagacgcgacccctggctctgcctgaggtggtgaagtcacagcggcccctgcagaggcaggtccacctgagaggccggccggcctcccagcccactgtcatccggggcatcacctactataaagccaaggtctctgaagaagagaatgacattgaagagcagcaagatgagtttttcagcggtgacaatggagtggatttgctgattgaagatcagctcctgagacacaacggcctgatgaccagtgtcacccggaggcctgcagccacccgtcagggacacagcactgctgtgacaagcgacctgaacgctcggaccgcaccctggtcctcagcactgccacagccctcgacctcagatcccagcatcgccaaccatgcctcagtgggaccaacactccaaacaacctcggtgtctccagatcccacaagggagtcagtcctgcagccttctcctcaggtaccagccaccactgtggcccacacagccacccagcaaccagcagccccagctcctccggcagtgtctcccagggaggcattgatggaagctatgcacacagtcccagtgcctcccaccacagtcagaacagactcgctggggaaagatgctcctgctgggtggggaacaacccctgccagccccacgctgagccccgaagaagaagatgacatccggaatgtcataggaaggtgcaaggacactctctccacaatcacggggccgaccacccagaacacatatgggcggaatgaaggggcctggatgaaggaccccctggccaaggatgagcggatttacgtaaccaactattactacggcaacaccctggtagagttccggaacctggagaacttcaaacaaggtcgctggagcaattcctacaagctcccgtacagctggatcggcacaggccacgtggtatacaatggcgccttctactacaatcgcgccttcacccgcaacatcatcaagtacgacctgaagcagcgctacgtggctgcctgggccatgctgcatgacgtggcctacgaggaggccaccccctggcgatggcagggccactcagacgtggactttgctgtggacgagaatggcctatggctcatctacccggccctggacgatgagggcttcagccaggaggtcattgtcctgagcaagctcaatgccgcggacctgagcacacagaaggagaccacatggcgcacggggctccggaggaatttctacggcaactgcttcgtcatctgtggggtgctgtatgccgtggatagctacaaccagcggaatgccaacatctcctacgctttcgacacccacaccaacacacagatcgtccccaggctgctgttcgagaatgagtattcctatacgacccagatagactacaaccccaaggaccgcctgctctatgcctgggacaatggccaccaggtcacttaccatgtcatctttgcctactgacacccttgtccccacaagcagaagcacagaggggtcactagcaccttgtgtgtatgtgtgtgcgcgcacgtgtgtgtaggtgggtatgtgttgtttaaaaatatatattattttgtataatattgcaaatgtaaaatgacaatttgggtctatttttttatatggattgtagatcaatccatacgtgtatgtgctggtctcatcctccccagtttatatttttgtgcaaatgaacttctccttttgaccagtaaccaccttccttcaagccttcagcccctccagctccaagtctcagatctcgaccattgaaaaggtttcttcatctgggtcttgcaggaggcaggcaacaccaggagcagaaatgaaagaggcaagaaagaagtgctatgtggcgagaaaaaaagttttaatgtattggagaagttttaaaaaacccagaaaaacgctttttttttttaataaagaagaaatttaaaatcaaaaaaaaaaaaaaaaaaaaaaaaaaaaaaaaaaaaaaaaaaaaaaaaaaaaaaaaaaaaaaaaaaaaaaaaaaaaaaaaa

SEQ ID NO: 48 - DNA, 3345 bp, Homo sapiens
gctggtggcgcccgccagccggcccgggagaggggacttgagcgcttcgcggccggtgcgcagcgcggctccggccccgcagtctgtctgcaagtggccatccccgcccccgactcctgcggccggtgcgggagctgtcagctgcacgttgcgggggtaccggagaagccggggttgccttctcccggttctgtgcgctaaccccggagcccggccccggggaactagggagcgtctccggctgcacagcgctcaggttttagggtttcctttgggccacccaaaatgttttttaaatactttggataagagctaaaccacctgccactggggacttccatactctcggctcccttgtcatctgatggcattttgattgtctcgaggccaagtgacttgctgtccatgatgagtgatgagaagaaccttggtgtgtcccaaaaattggtatcaccttcaaggagcacaagtagctgctcttccaagcaaggaagtcgacaggacagctgggaagtggtggaaggactgaggggggagatgaattacacccaggagccaccagttcagaaaggatttttgctgaaaaagaggaagtggcccttaaaaggctggcataagagattcttctatctggacaaaggaatcttgaaatatgccaagagccaaaccgatatagagagagagaagctgcatggctgcattgatgtcgggctctcagtgatgtctgtaaagaagtcatcaaaatgcatagaccttgacaccgaggagcacatctaccatctgaaggtcaagtcagaagaagtctttgatgagtgggtatcgaaacttcgccaccacagaatgtatcgtcagaatgaaattgccatgtttccacatgaagttaaccactttttctcagggtccaccatcacagactcttcatctggggtgtttgactccatttcaagtaggaagcgtagcagtatatcaaagcagaatttatttcaaactggaagcaatgtatcattttcttgtggtggtgagacacgagttccattatggttacagtcttcagaggacatggaaaaatgctccaaagacctggcgcactgtcatgcctacctggtagaaatgagccagctcctgcaaagcatggacgtcctgcatcggacatactcagcaccagctatcaacgccatccagggtggatcttttgaaagtcccaaaaaggaaaaaagatcgcacaggaggtggcggtccagagctattggcaaagatgctaaaggaacactgcaggtcccgaaacctttttctggcccagtaagactacactcctccaatcctaatttgtcaacactagattttggagaagagaaaaattattctgatggctctgaaacctcatcagagttttctaaaatgcaagaagatctgtgtcatattgcccataaagtttacttcactttaaggtcagcttttaatatcatgtcagcggagagagagaaactgaagcagctgatggagcaggatgcctcctcctccccgtctgctcaggtcattggtctgaagaacgccctgtcatccgccctagcacaaaacacagatcttaaagaacgcttacgcagaatccatgccgagtctctgctcctcgactcccccgctgtcgccaagtcgggtgacaatctggcagaggaaaactccagagatgaaaaccgagctctagttcatcagctttctaatgaaagtagactctccatcactgactccctttctgagttttttgatgctcaggaagttctgttatctccaagctcttcagaaaacgagatttctgatgatgactcatatgtcagtgacataagtgataatctttccttagataatctcagtaatgatttagataatgagagacagaccttggggcctgtccttgatagtggtcgggaagcgaagtcccggagaagaacgtgcctgccggcgccctgcccgagcagcagtaacatcagcctgtggaacatcctgaggaacaacatcgggaaggacctgtccaaggtggccatgccggtggagctgaacgagcccctgaacacgctgcagaggctctgcgaggagctggagtacagcgagctcctggacaaggccgcgcagattcccagccccctggaaaggatggtatatgtggcagcctttgccatatcagcgtatgcatctagctactaccgagctggaagcaagccatttaatccggttcttggagaaacatatgaatgtattcgggaggacaagggcttccagtttttttcagaacaggtcagccaccatccgcctatctctgcgtgtcatgctgagtctagaaattttgttttctggcaagatgtgagatggaaaaacaaattctggggcaaatccatggaaattgttccaattggcacaacccatgtgactctgccagtttttggggatcattttgagtggaacaaagtgacctcttgcatccataacatcttaagcgggcagaggtggattgagcactatggagagattgtcatcaagaacctgcatgatgattcctgctactgcaaagtgaattttataaaggcaaaatactggagcactaatgcccatgagattgaaggcacagtgtttgacaggagtggaaaagcggttcatcggctgtttgggaaatggcatgaaagcatctactgtggcggcggctcctcttctgcctgtgtatggagagcaaatcctatgccgaaaggctacgagcaatactatagcttcacacagtttgcgctggaattaaatgaaatggatccatcatcaaagtctttattgccacctactgacactcgatttaggccagaccagaggtttctagaggaagggaacttagaagaagctgaaatacaaaagcagaggattgaacaactgcagagagaaaggcggcgggtcttagaagaaaatcatgtggagcaccagcctcggtttttcaggaaatccgacgatgactcttgggtgagcaacggcacctatttggaacttagaaaagatcttggtttttccaaactggaccatcctgtcttatggtgaaaaagtaaagaagaaagataacattagtgtatttctcctgtgcttgccttctgaagtggcacaaacctgtgtttatatatttaaaagatactctaggatgatcacttgtgcttagcttagcattgtaactctttaagtctatattttcctcagtgcgtttctttacaatttcaaatgttaccctgattgtttatatgaatgtagaacaccttgacatttctttttatatataaactatttaataaaaatgaaagattgaaaaaaaaaaaaaaaaaa

SEQ ID NO: 49 - DNA, 1684 bp, Homo sapiens
cggacgcgtgggcatgtatgtaccagcagtggttacttgcattgtgtagtgtttttcaagaggtctgggtcttaacaaaatgttttcctttatctcagtgctcttctgcctctttttgttggtgtcctttgagaacaatacaccttctattccttcatttggttacacctttccttgtgacatttagcgagtttcaaacttacttccatatgaggctaagaaacctcaaatttcaggaattgggaaaaataaaattagcacttgcagaagtagcagcagatgggaaaatgccttgattgacattttctttcagcatttaaaatttttggcattttacagcttcatgacaaacagttttgtgcccataccttagaaaatgtggtgctgagttaaataaaggctgtttgagcactggagcagaaaaatgcattatttgcaaactggtggataattttgtgccttctcttctggccaccaagccagtgtagaaacagcaaaaatgtcataaaaattcttatatttaaaacaaaaacaaaagcaaaaacaaacattgaattaaattaagttttgtaattttaaactttaaaaacttctactgaaaatatttccgccaaatgccatcaatattttagactgtacctcgtttgcaaaactgctttgagagggaagagtggacaactcccatcagccttattctcttgagaactatattttggttcctagtaacagcctttccaaagctctactcttggtttttattactcataaatgtttaaattagaaaagaagggaccttgtacatgtgaaacctaattgactctctatattttggacaatttatgtatctgaaatgtgttgtctctgttatatgatgttatttttgccaggagactacaggttgatttagcttgatagctgaaatttgatggaaaactgatttccatttagtcttaccaagtgttgcttctctcttactagacagatatccacttagtaaaatctaaagcagtatgtaaatgaaaccagcaaagagagtagggtttattttataaacattcttaatgctaagtaaccagttgttcaatttattatatgtgtctgaggacattaaaacaccataagattgtaataattggttgtgccaatgtgtgagggatttacctttaggctctctgtcaccagtgatttactagtgttagctgtttaacacattatctgtatttagtagtgattatttatttacaagttggtggtaattcagcagtcaggactctaagcttttatagttgaattgaggaaatctcgcttttattcatttagctggcaactgcctttattgcagacctctggtgcttggctttcaaggaagcctatgagatgccaaaatcacacctttagagagcaccttgctctaataggtgatgcatgagcaaacagtgagatttgaaggggttttaacataatttagaatgtgaaaaaaatatcaattcatatctttcaagtactaacccctcaaaaaagcccacacatacaaaatatgtgatgtgataccactttgtcttttaggtctttaagtaactgaagttaagcacagaaaaaaaaatcacttcatggaaatttcagtaagaaacccaaacttctaaaaattgcttgcagatgagctagaaaaaaaaaaaaaaaaaaa

SEQ ID NO: 50 - DNA, 7992 bp, Homo sapiens
cgctgggcaacgtgggcaacgcggcgggcggcgggctcgcgcggcgggaggggcagcggcggcgcgcccgggctctacctcccgggctctgcctcccgggctctgcctctcgggcacttgcctggctcctgcgcgttcctgggcatcggctctgcagctgacacacagtagcggggacacccgacgccgctagcgacaggcgcgcggacggctggtcccagagggacgctgcgcttggggacgccggcgagactcgccaggagccaagaggaaacaggaatcattcaaactggattttaaaatcattgcaaatcagtgatggatcagaagttgcagagtgcaatcccgagtaaaagtcttcaaaaaattttgcttcaggtaacagaggaaggaaaattgatctaccaccttaaaaccctgatctagaaaaaatatatattcatgataggaagttataactaagaaaatttatttgcctcttaatgctcctgaatgaaaggaattatccctttgttctttgggaggacttgtgtatctgagattgttgtaataatcagtcattttattaaaaccttgacatgatcaccagggaggaaaaatagagcaatagtcaaaacctgtgtgttagtccaagatgacttctgaagaaatgacagcttctgttctcatacctgtgactcagagaaaagtggtttctgcccagtcggctgcagatgaaagtagtgaaaaggtctcagacatcaatatttcaaaagcacatactgtcagacgaagtggggagacttctcataccatctcacaactgaacaaacttaaagaagaaccttctggaagcaacttgccaaagattctctcaatagcgagggagaaaatagtgagtgatgagaacagtaatgaaaaatgttgggagaaaatcatgccagattctgcgaaaaaccttaacattaactgcaacaacatattgagaaaccatcagcatggccttcctcagagacaattttatgaaatgtacaactctgttgctgaggaagacttgtgtttagaaactggaattccttctccactggaaagaaaggtgttccctggaattcaactggaactagacagaccttccatgggcattagtcctttaggaaatcagtcagtgatcatagagacaggcagagcacaccctgacagcagaagggcagtatttcattttcattatgaagttgacagaagaatgtcagacactttctgtaccctatcagaaaacttaattttagacgattgtggaaattgtgtaccactacctgggggtgaggagaagcaaaagaaaaactatgtggcatatacctgtaaactgatggaattggccaaaaattgtgataataagaatgagcagctgcagtgtgatcattgtgacaccttgaatgataaatacttttgctttgaaggctcttgtgagaaggttgacatggtatattcaggtgatagcttttgtaggaaagactttactgacagtcaagctgccaagacctttttgagccattttgaggacttccctgataattgtgatgatgtagaagaagacgcttttaaaagcaaaaaggagcgatccactttgttagtcaggagattctgtaaaaatgacagagaagttaagaaatctgtgtatactggaacaagagcaattgtgagaactctgccttctggccacattgggctgactgcatggagttacatagatcagaagagaaatggtcccttactgccttgtgggagagtaatggaacccccgtcaacagtggagataaggcaagatgggagccaacgtctgtcagaagcccagtggtatcctatctacaatgcagtgagaagagaagaaacagaaaatacagttggatctctactccatttcctcaccaagctcccagcctccgagacagcccatggaaggataagcgttggtccatgcttaaagcaatgtgtccgagacactgtatgtgagtatcgcgccaccctccaaaggacttcaatatcgcagtacatcaccggttctctcctagaagcaaccacgtctttgggagcaagaagtggccttctcagtacttttggaggatccactggacgaatgatgctgaaagaacgccagccaggcccctctgtggccaattccaatgccctcccttcaagttcagctgggatcagcaaggagctgatcgatctgcagcctctcatccagttcccagaggaagtcgccagcatcctgatggagcaagagcagactatttaccgcagggtcttgccagtcgactacctttgcttcttaacacgggacttgggcactcctgaatgccagagctccttgccctgcctcaaagcatccatctcagcgtcgattcttaccactcagaatggagagcacaatgcccttgaagatctggtgatgaggtttaatgaggtgagctcctgggtgacatggctgatcctcacggcaggctccatggaggagaagcgagaagtcttttcatatttggtgcatgtggccaaatgctgctggaacatgggcaactacaacgctgtcatggagttcttggctggcctcaggtcaagaaaagttttaaaaatgtggcagttcatggaccagtctgatattgagaccatgaggagcctgaaggatgctatggcccagcatgagtcctcttgtgagtacagaaaggtggtgacacgtgccctgcacatccctggctgtaaggtggttccattctgtggggtgtttctgaaggagctctgtgaagtgcttgacggcgcctccggtctcatgaagctttgcccgcggtacaattcccaagaagaaactttagagtttgtagcagattacagtggacaagataatttcttacaacgagtgggacaaaatggcttaaagaattcggagaaggagtccactgtcaacagcatctttcaggtcatccggagctgcaatcgaagtctggagacagacgaggaggacagccccagtgaaggaaacagctccaggaaaagctccttgaaggataaaagccgatggcagtttataattggagatttgttggattcagacaatgacatctttgagcaatccaaagaatacgactctcatggttcagaggactcacagaaggccttcgaccatgggacggagctcatcccttggtacgtgctgtccatccaagccgatgtgcaccagttcctgctgcagggggccacggtcatccactacgaccaggacacacacctctctgcccgctgcttcctccagcttcagcccgacaatagcaccttgacctgggtaaagcccacaactgcctccccagccagcagtaaagcaaaacttggtgtacttaataacacagctgagcctggaaaattcccactactgggtaatgctggattaagtagcctgacggaaggggtcttggatctttttgcagtgaaggctgtatacatgggccaccctggcattgatatacacactgtgtgtgttcagaacaaactgggtagcatgttcctgtcagagactggtgtgacattgctctatgggcttcagaccacagacaacagattattgcacttcgtggcaccaaagcacacagctaaaatgctcttcagcggattattggaactcactagagctgtgagaaagatgaggaaattccctgaccaaagacagcagtggctgcggaaacagtacgtcagcctttatcaggaggatggacggtatgaaggcccaactttggctcacgctgtggagttgtttggtggcagacggtggagtgctcgaaaccccagccccggaacatcagcaaagaatgctgagaagcccaatatgcagagaaacaataccctgggcataagcactaccaagaaaaagaagaaaatcctcatgaggggtgagagtggagaggtaactgacgatgagatggcaacccgaaaggccaagatgcacaaagagtgtcgaagccggagtggttctgatcctcaagacattaatgaacaagaagaatcagaggtgaatgccatcgctaaccctccaaaccccctcccttccagaagagcccactctttgaccacagctgggtcccccaacttggctgccgggacgtcatctcccatcaggccagtgtcctcccctgtgctgtcttcttcaaacaagagcccatccagtgcttggagcagtagtagctggcacgggcggatcaaaggcggcatgaagggatttcagagcttcatggtttcagatagcaacatgagttttgttgaatttgttgagctgttcaaatcattcagtgtcaggagccgcaaggacctgaaggatctgtttgatgtctatgcagtgccctgcaaccgatctggctccgagtcagccccactctacaccaacctgacaattgatgaaaacaccagcgatcttcagcctgacctagatctgttgaccagaaatgtctcggatttggggttgttcattaagagtaaacagcagctatcggacaaccagaggcagatatctgatgccattgctgctgcaagcattgtgacaaatggcactgggattgagagcacatctctgggcatttttggggtgggcatacttcagctcaacgatttcctcgtgaattgccaaggagaacactgcacttatgatgaaatcctcagcatcatccagaagttcgagcctagcatcagtatgtgtcatcagggactaatgtcatttgaagggtttgccaggtttctgatggataaagaaaattttgcctcaaaaaatgatgagtcacaggagaacattaaagaactgcagctacccctctcatactattacatcgaatcttcgcacaatacctacctcacgggccatcagctcaaaggagaatcctcggtagaactctacagccaggtccttttgcaaggctgtcgaagtgtagaattggactgctgggacggagacgatgggatgcccatcatttatcatggacatacgctgacaaccaagatccccttcaaggaagtggttgaagccattgatcgcagtgccttcatcaactctgacctgccaatcatcatatcgattgagaaccactgttcattgcctcagcaacgaaaaatggcagaaattttcaagactgtgtttggagaaaagctggtgactaaattcttatttgagactgatttctcagatgatccaatgcttccttcacctgaccaactcagaaagaaagttcttcttaaaaacaagaagctaaaagcccatcagacgccagtggatatcttaaagcaaaaggctcatcagttagcatctatgcaagtgcaggcttataatggtgggaatgccaacccccgacctgccaataatgaggaagaggaagatgaggaggacgaatatgattatgactatgaatccctttctgatgacaacattctggaagacagacctgaaaataaatcatgtaatgacaagcttcagtttgaatataatgaagaaatcccaaagaggataaagaaagcagataactctgcttgcaacaaaggaaaggtttatgatatggaactgggagaagaattttatcttgatcagaataaaaaggaaagcagacagattgcaccagagctttctgaccttgtaatctattgtcaagcagtaaaatttccaggactgtcaactctaaatgcatctggctctagcagaggaaaagaaaggaaaagcaggaagtccatttttggcaacaatccgggcagaatgagcccaggggagacagcatcatttaacaaaacatctggaaaaagttcctgtgaaggcattcgacagacctgggaggaatcttcttcccctctcaacccaaccacgtccctcagtgctatcattagaactcccaaatgttatcatatctcgtcgctgaatgaaaatgccgccaaacgtctgtgtcgcaggtattctcagaaactgacccagcacaccgcctgtcagctgctgagaacttaccctgctgccacccgcatcgactcttccaacccgaaccccctcatgttctggctccatgggatacagcttgtggcactcaactaccagactgatgatctccctttacatttaaatgctgcaatgtttgaggcaaatggtggttgtggttatgtattgaaacctccagttctgtgggacaagaactgccccatgtatcagaagttttctccactagaaagagatctggacagcatggatcctgcagtctattctttaactattgtctctggtcagaatgtgtgccccagtaatagcatgggaagcccgtgcattgaagtcgacgtcctgggcatgcctctggacagctgccatttccgcacaaagcccatccatcgaaacaccctgaaccccatgtggaacgagcagtttctgttccacgttcacttcgaagatcttgtatttcttcgttttgcagttgtggaaaacaatagttcagcggtaactgctcagagaatcattccactgaaagctttaaaacgaggatatcgacatcttcagctgcgaaaccttcacaatgaagtcttggagatttctagtttattcattaacagcagaaggatggaagaaaattcctctggcaataccatgtcagcctcttcgatgtttaatacagaagaaagaaaatgtttgcagactcacagagtcacggtgcatggggtcccagggccagagccctttaccgttttcactattaatggaggcaccaaggcaaagcagcttctgcagcaaattctgacaaatgaacaagacatcaaacctgttaccacagactattttttgatggaagaaaaatattttatatctaaagaaaagaatgaatgtaggaaacaaccattccagagagccattggtccagaagaggagatcatgcaaattttaagcagctggtttccagaagagggatacatgggcaggattgtcttaaaaacccagcaggaaaacctagaagagaaaaacattgttcaagatgacaaagaggtgatcttgagctcagaggaggagagtttctttgtccaagtgcatgatgtttctccagagcaacctcgaacagtcatcaaagcaccccgcgtcagcactgcacaggatgtcattcagcagaccttatgcaaagccaaatattcctacagcatcctgagcaaccccaatccaagcgactatgtgcttttggaagaggtggtgaaagacactaccaacaagaagactaccacaccaaagtcctctcagcgggtccttctggatcaggagtgtgtgtttcaagcccaaagcaagtggaaaggtgcaggaaaattcatccttaagctaaaggagcaggtgcaggcatctcgagaagataaaaagaaaggcatttctttcgcaagtgaactcaagaagctcaccaagtcaactaaacagccccgaggacttacatcaccttctcagctcttgacctcagaaagtatccaaaccaaggaggagaaacctgtgggtggcttgtcctccagtgacacaatggattaccgacagtgactaagggcagcatgtttaacccaggtgaagatctttaagcaagaagttaaagagtgaacatggtggaaaaaatataattattttcatcagacttaaactggaaattgatgatttctgaactgaagccttcacacatgtgagatccatgctgaggagaagcaaaatggcacagggctagttgccaccaaccaatttactgatgaatgaagcccaggggactgccattttataaatgtcagcagttggaaaaatcgtcacgaattgacttagagcaagggtcagcaagcttgtctgtaaagggccaaacagtaaatattttagggctgggggccataaaatatgttgcaaccacccaattctgccattgtagtgcaaaagcagccatagacaacacatacatgaacgaacgtggctgtattccaataaaactttatttatggacactgaaa

SEQ ID NO: 51 - DNA, 2405 bp, Homo sapiens
agctccgctcgcgctctcgccgctcctgccggctcgcccggccccgcgctccgccgtctcctcgccgcccgcccctccgccagccccggggaccgcgcggccgcagcctgagccagggccccctccctcgtcaggaccggggcagcaagcaggccgggggcaggtccgggcacccaccatgcgaggcgagctctggctcctggtgctggtgctcagggaggctgcccgggcgctgagcccccagcccggagcaggtcacgatgagggcccaggctctggatgggctgccaaagggaccgtgcggggctggaaccggagagcccgagagagccctgggcatgtgtcagagccggacaggacccagctgagccaggacctgggtgggggcaccctggccatggacacgctgccagataacaggaccagggtggtggaggacaaccacagctattatgtgtcccgtctctatggccccagcgagccccacagccgggaactgtgggtagatgtggccgaggccaaccggagccaagtgaagatccacacaatactctccaacacccaccggcaggcttcgagagtggtcttgtcctttgatttccctttctacgggcatcctctgcggcagatcaccatggcaactggaggcttcatcttcatgggggacgtgatccatcggatgctcacagctactcagtatgtggcgcccctgatggccaacttcaaccctggctactccgacaactccacagttgtttactttgacaatgggacagtctttgtggttcagtgggaccacgtttatctccaaggctgggaagacaagggcagtttcaccttccaggcagctctgcaccatgacggccgcattgtctttgcctataaagagatccctatgtctgtcccggaaatcagctcctcccagcatcctgtcaaaaccggcctatcggatgccttcatgattctcaatccatccccggatgtgccagaatctcggcgaaggagcatctttgaatatcaccgcatagagctggaccccagcaaggtcaccagcatgtcggccgtggagttcaccccattgccgacctgcctgcagcataggagctgtgacgcctgcatgtcctcagacctgaccttcaactgcagctggtgccatgtcctccagagatgctccagtggctttgaccgctatcgccaggagtggatggactatggctgtgcacaggaggcagagggcaggatgtgcgaggacttccaggatgaggaccacgactcagcctcccctgacacttccttcagcccctatgatggagacctcaccactacctcctcctccctcttcatcgacagcctcaccacagaagatgacaccaagttgaatccctatgcaggaggagacggccttcagaacaacctgtcacccaagacaaagggcactcctgtgcacctgggcaccatcgtgggcatcgtgctggcagtcctcctcgtggcggccatcatcctggctggaatttacatcaatggccaccccacatccaatgctgcgctcttcttcatcgagcgtagacctcaccactggccagccatgaagtttcgcagccaccctgaccattccacctatgcggaggtggagccctcgggccatgagaaggagggcttcatggaggctgagcagtgctgagaacaccaagtctcccctttgaagactttgaggccacagaaaagacagttaaagcaaagaagagaagtgacttttcctggcctctcccagcatgccctgggctgagatgagatggtggtttatggctccagagctgctgctcgcttcgtcagcacaccccgaatattgaagagggggccaaaaaacaaccacatggattttttataggaacaacaacctaatctcatcctgttttgatgcaagggttctcttctgtgtcttgtaaccatgaaacagcagaagaactaacataactaactccatttttgtttaaggggcctttacctattcctgcacctaggctaggataactttagagcactgacataaaacgcaaaaacaggaatcatgccgtttgcaaaactaactctgggattaaaggggaagcatgtaaacagctaactgtttttgttaaagatttataggaatgaggaggtttggctattgtcacatgacagactgttagccaaggacaaagaagttctgcaaacctcccctggacccttgctggtgtccagatgtctgcggttgtcagccccttcctttcccccgacctaaacataaaagacaaggcaaagcccgcataattttaagacggttctttaggacattagtccaccatcttcttggtttgctggctctccgaaataaagtccctttccttgctccaaaaaaaaaaaaaaaa

SEQ ID NO: 52 - DNA, 5165 bp, Homo sapiens
gggaagccagacggttaacacagacaaagtgctgccgtgacactcggccctccagtgttgcggagaggcaagagcagcgaccgcggcacctgtccgcccggagctgggacgcgggcgcccgggcggccggacgaagcgaggagggaccgccgaggtgcgcgtctgtgcggctcagcctggcgggggacgcggggagaatgtggactgggtagagatgaacgagacttttctcagatgttggatatttgcttggaaaaacgtgtgggtacgaccttggctgcccccaagtgtaactccagcactgtgaggtttcagggattggcagaggggaccaaggggaccatgaaaatggacatggaggatgcggatatgactctgtggacagaggctgagtttgaagagaagtgtacatacattgtgaacgaccacccctgggattctggtgctgatggcggtacttcggttcaggcggaggcatccttaccaaggaatctgcttttcaagtatgccaccaacagtgaagaggttattggagtgatgagtaaagaatacataccaaagggcacacgttttggacccctaataggtgaaatctacaccaatgacacagttcctaagaacgccaacaggaaatatttttggaggatctattccagaggggagcttcaccacttcattgacggctttaatgaagagaaaagcaactggatgcgctatgtgaatccagcacactctccccgggagcaaaacctggctgcgtgtcagaacgggatgaacatctacttctacaccattaagcccatccctgccaaccaggaacttcttgtgtggtattgtcgggactttgcagaaaggcttcactacccttatcccggagagctgacaatgatgaatctcacacaaacacagagcagtctaaagcaaccgagcactgagaaaaatgaactctgcccaaagaatgtcccaaagagagagtacagcgtgaaagaaatcctaaaattggactccaacccctccaaaggaaaggacctctaccgttctaacatttcacccctcacatcagaaaaggacctcgatgactttagaagacgtgggagccccgaaatgcccttctaccctcgggtcgtttaccccatccgggcccctctgccagaagactttttgaaagcttccctggcctacgggatcgagagacccacgtacatcactcgctcccccattccatcctccaccactccaagcccctctgcaagaagcagccccgaccaaagcctcaagagctccagccctcacagcagccctgggaatacggtgtcccctgtgggccccggctctcaagagcaccgggactcctacgcttacttgaacgcgtcctacggcacggaaggtttgggctcctaccctggctacgcacccctgccccacctcccgccagctttcatcccctcgtacaacgctcactaccccaagttcctcttgcccccctacggcatgaattgtaatggcctgagcgctgtgagcagcatgaatggcatcaacaactttggcctcttcccgaggctgtgccctgtctacagcaatctcctcggtgggggcagcctgccccaccccatgctcaaccccacttctctcccgagctcgctgccctcagatggagcccggaggttgctccagccggagcatcccagggaggtgcttgtcccggcgccccacagtgccttctcctttaccggggccgccgccagcatgaaggacaaggcctgtagccccacaagcgggtctcccacggcgggaacagccgccacggcagaacatgtggtgcagcccaaagctacctcagcagcgatggcagcccccagcagcgacgaagccatgaatctcattaaaaacaaaagaaacatgaccggctacaagacccttccctacccgctgaagaagcagaacggcaagatcaagtacgaatgcaacgtttgcgccaagactttcggccagctctccaatctgaaggtccacctgagagtgcacagtggagaacggcctttcaaatgtcagacttgcaacaagggctttactcagctcgcccacctgcagaaacactacctggtacacacgggagaaaagccacatgaatgccaggtctgccacaagagatttagcagcaccagcaatctcaagacccacctgcgactccattctggagagaaaccataccaatgcaaggtgtgccctgccaagttcacccagtttgtgcacctgaaactgcacaagcgtctgcacacccgggagcggccccacaagtgctcccagtgccacaagaactacatccatctctgtagcctcaaggttcacctgaaagggaactgcgctgcggccccggcgcctgggctgcccttggaagatctgacccgaatcaatgaagaaatcgagaagtttgacatcagtgacaatgctgaccggctcgaggacgtggaggatgacatcagtgtgatctctgtagtggagaaggaaattctggccgtggtcagaaaagagaaagaagaaactggcctgaaagtgtctttgcaaagaaacatggggaatggactcctctcctcagggtgcagcctttatgagtcatcagatctacccctcatgaagttgcctcccagcaacccactacctctggtacctgtaaaggtcaaacaagaaacagttgaaccaatggatccttaagattttcagaaaacacttattttgtttcttaagttatgacttggtgagtcagggtgcctgtaggaagtggcttgtacataatcccagctctgcaaagctctctcgacagcaaatggtttcccctcacctctggaattaaagaaggaactccaaagttactgaaatctcagggcatgaacaaggcaaaggccatatatatatatatatatatatctgtatacatattatatatacttatttacacctgtgtctatatatttgcccctgtgtattttgaatatttgtgtggacatgtttgcatagccttcccattactaagactattacctagtcataattattttttcaatgataatccttcataatttattatacaatttatcattcagaaagcaataattaaaaaagtttacaatgactggaaagattccttgtaatttgagtataaatgtatttttgtcttgtggccattctttgtagataatttctgcacatctgtataagtacctaagatttagttaaacaaatatatgacttcagtcaacctctctctctaataatggtttgaaaatgaggtttgggtaattgccaatgttggacagttgatgtgttcattcctgggatcctatcatttgaacagcattgtacataacttgggggtatgtgtgcaggattacccaagaataacttaagtagaagaaacaagaaagggaatcttgtatatttttgttgatagttcatgtttttcccccagccacaattttaccggaagggtgacaggaaggctttaccaacctgtctctccctccaaaagagcagaatcctcccaccgccctgccctccccaccgagtcctgtggccattcagagcggccacatgacttttgcatccattgtattatcagaaaatgtgaagaagaaaaaaatgccatgttttaaaaccactgcgaaaatttccccaaagcataggtggctttgtgtgtgtgcgatttgggggcttgagtctgggtggtgttttgttgttggtttttgttgctttttttttttttttttttttaatgtcaaaattgcacaaacatggtgctctaccaggaaggattcgaggtagataggctcaggccacactttaaaaacaaacacacaaacaacaaaaaacgggtattctagtcatcttggggtaaaagcgggtaatgaacattcctatccccaacacatcaattgtattttttctgtaaaactcagattttcctcagtatttgtgtttttacattttatggttaatttaatggaagatgaaagggcattgcaaagttgttcaacaacagttacctcattgagtgtgtccagtagtgcaggaaatgatgtcttatctaatgatttgcttctctagaggagaaaccgagtaaatgtgctccagcaagatagactttgtgttattctatcttttattctgctaagcccaaagattacatgttggtgttcaaagtgtagcaaaaaatgatgtatatttataaatctatttataccactatatcatatgtatatatatttataaccacttaaattgtgagccaagccatgtaaaagatctactttttctaagggcaaaaaaaaaaaaaaaaaaaaaagaacactcctttctgagactttgcttaatacttggtgacctcacaatcacgtcggtatgattgggcacccttgcctactgtaagagaccctaaaaccttggtgcagtggtggggaccacaaaacaaccagggaggaagagatacatcattttttagtattaaggaccatctaagacagctctattttttttttgccactttatgattatgtggtcacacccaagtcacagaaataaaaaactgactttaccgctgcaatttttctgttttcctccttactaaatactgatacattactccaatctattttataattatatttgacattttgttcacatcaactaatgttcacctgtagaagagaacaaatttcgaataatccagggaaacccaagagccttactggtcttctgtaacttccaagactgacagctttttatgtatcagtgtttgataaacacagtccttaactgaaggtaaaccaaagcatcacgttgacattagaccaaatacttttgattcccaactactcgtttgttctttttctccttttgtgctttcccatagtgagaatttttataaagacttcttgcttctctcaccatccatccttctcttttctgcctcttacatgtgaatgttgagcccacaatcaacagtggttttattttttcctctactcaaagttaaaactgaccaaagttactggctttttactttgctagaacaacaaactatcttatgtttacatactggtttacaatgttatttatgtgcaaattgtcaaaatgtaaattaaatataaatgttcatgctttaccaaaaa

SEQ ID NO: 53 - DNA, 972 bp, Homo sapiens
agggggggcgcggaccgtgctgggagcggcgcggctggagcgcagcgccgaagggactggcagggctgaagtgtgcgggacagcaagcccccgaatagccccggctgccacctcgcaggacccaaggccacgcgcgccgggcccagctgagccgcctcatgaagcagcccgcggcgcagggcagccccgcggccgccgcggccgcagccccggccctggactcggcggccgcggaggacctgtcggacgcgctgtgcgagtttgacgcggtgctggccgacttcgcgtcgcccttccacgagcgccacttccactacgaggagcacctggagcgcatgaagcggcgcagcagcgccagtgtcagcgacagcagcggcttcagcgactcggagagtgcagattcactttataggaacagcttcagcttcagtgatgaaaaactgaattctccaacagactctaccccagctcttctctctgccactgtcactcctcagaaagctaaattaggagacacaaaagagctagaagccttcattgctgatcttgacaaaactttagcaagtatgtgaaacaagaagttctgggtcctttcatcataagggagaagcttcagaaagttccgaggacctgctaaaatcagctactagaatctgctgccagaggggacaaagacgtgcactcaaccttctaccaggccactctcaggctcaccttaaaatcagcccttgatcccatttctgggcaatttagacagtgaaactgactttgtttacctgcttgcagcatattagaacagacgatccatgctaatattgtattttctcttaaaacatagctttcctgtaatttaaagtgcttttatgaaaatatttgtaattaattatatatagttggaaatagcagtaagctttcccattataatatatttttgtatacaaataaaatttgaactgaaaaaaaaaaaaaaaa

SEQ ID NO: 54 - DNA, 1379 bp, Homo sapiens
gcgcgcagcagccatctccactccaaagttagacaaaatgccaggaatgttcttctctgctaacccaaaggaattgaaaggaaccactcattcacttctagacgacaaaatgcaaaaaaggaggccaaagacttttggaatggatatgaaagcatacctgagatctatgatcccacatctggaatctggaatgaaatcttccaagtccaaggatgtactttctgctgctgaagtaatgcaatggtctcaatctctggaaaaacttcttgccaaccaaactggtcaaaatgtctttggaagtttcctaaagtctgaattcagtgaggagaatattgagttctggctggcttgtgaagactataagaaaacagagtctgatcttttgccctgtaaagcagaagagatatataaagcatttgtgcattcagatgctgctaaacaaatcaatattgacttccgcactcgagaatctacagccaagaagattaaagcaccaacccccacgtgttttgatgaagcacaaaaagtcatatatactcttatggaaaaggactcttatcccaggttcctcaaatcagatatttacttaaatcttctaaatgacctgcaggctaatagcctaaagtgactggtccctggctgaagggaattaacagatagtatcaagcgcagaaggaatgtgccagtatggctccctgggtgaacagcttggccttttgtgggtgtcttgacagcccaagaagaacaaatgactcagaatggattaacatgaaagttatccaggcgcagagttgaagaagcataagcaagacaaaaacagagagaccgcagaaggaggaagatactgtggtactgtcataaaaaacagtggagctctgtattagaaagcccctcagaactgggaaggccaggtaactctagttacacagaaactgtgactaaagtctatgaaactgattacaacagactgtaagaatcaaagtcaactgacatctatgctacatattattatatagtttgtactgagctattgaagtcccattaacttaaagtatatgttttcaaattgccattgctactattgcttgtcggtgttattttattttattgtttttgactttggaagagatgaactgtgtatttaacttaagctattgctcttaaaaccagggagtcagaatatatttgtaagttaaatcattggtgctaataataaatgtggattttgtattaaaatatatagaagcaatttctgtttacatgtccttgctacttttaaaaacttgcatttattcctcagattttaaaaataaataaataattcatttaaaaaaaaaaaaaaaaaaaaaaaaaaaaaaaaaaaaaaaaaaaaaaaaaaa

SEQ ID NO: 55 - DNA, 2500 bp, Homo sapiens
cccaggcgcagccaatgggaagggtcggaggcatggcacagccaatgggaagggccggggcaccaaagccaatgggaagggccgggagcgcgcggcgcgggagatttaaaggctgctggagtgaggggtcgcccgtgcaccctgtcccagccgtcctgtcctggctgctcgctctgcttcgctgcgcctccactatgctctccctccgtgtcccgctcgcgcccatcacggacccgcagcagctgcagctctcgccgctgaaggggctcagcttggtcgacaaggagaacacgccgccggccctgagcgggacccgcgtcctggccagcaagaccgcgaggaggatcttccaggagcccacggagccgaaaactaaagcagctgcccccggcgtggaggatgagccgctgctgagagaaaacccccgccgctttgtcatcttccccatcgagtaccatgatatctggcagatgtataagaaggcagaggcttccttttggaccgccgaggaggttgacctctccaaggacattcagcactgggaatccctgaaacccgaggagagatattttatatcccatgttctggctttctttgcagcaagcgatggcatagtaaatgaaaacttggtggagcgatttagccaagaagttcagattacagaagcccgctgtttctatggcttccaaattgccatggaaaacatacattctgaaatgtatagtcttcttattgacacttacataaaagatcccaaagaaagggaatttctcttcaatgccattgaaacgatgccttgtgtcaagaagaaggcagactgggccttgcgctggattggggacaaagaggctacctatggtgaacgtgttgtagcctttgctgcagtggaaggcattttcttttccggttcttttgcgtcgatattctggctcaagaaacgaggactgatgcctggcctcacattttctaatgaacttattagcagagatgagggtttacactgtgattttgcttgcctgatgttcaaacacctggtacacaaaccatcggaggagagagtaagagaaataattatcaatgctgttcggatagaacaggagttcctcactgaggccttgcctgtgaagctcattgggatgaattgcactctaatgaagcaatacattgagtttgtggcagacagacttatgctggaactgggttttagcaaggttttcagagtagagaacccatttgactttatggagaatatttcactggaaggaaagactaacttctttgagaagagagtaggcgagtatcagaggatgggagtgatgtcaagtccaacagagaattcttttaccttggatgctgacttctaaatgaactgaagatgtgcccttacttggctgattttttttttccatctcataagaaaaatcagctgaagtgttaccaactagccacaccatgaattgtccgtaatgttcattaacagcatctttaaaactgtgtagctacctcacaaccagtcctgtctgtttatagtgctggtagtatcaccttttgccagaaggcctggctggctgtgacttaccatagcagtgacaatggcagtcttggctttaaagtgaggggtgaccctttagtgagcttagcacagcgggattaaacagtcctttaaccagcacagccagttaaaagatgcagcctcactgcttcaacgcagattttaatgtttacttaaatataaacctggcactttacaaacaaataaacattgttttgtactcacggcggcgataatagcttgatttatttggtttctacaccaaatacattctcctgaccactaatgggagccaattcacaattcactaagtgactaaagtaagttaaacttgtgtagactaagcatgtaatttttaagttttattttaatgaattaaaatatttgttaaccaactttaaagtcagtcctgtgtatacctagatattagtcagttggtgccagatagaagacaggttgtgtttttatcctgtggcttgtgtagtgtcctgggattctctgccccctctgagtagagtgttgtgggataaaggaatctctcagggcaaggagcttcttaagttaaatcactagaaatttaggggtgatctgggccttcatatgtgtgagaagccgtttcattttatttctcactgtattttcctcaacgtctggttgatgagaaaaaattcttgaagagttttcatatgtgggagctaaggtagtattgtaaaatttcaagtcatccttaaacaaaatgatccacctaagatcttgcccctgttaagtggtgaaatcaactagaggtggttcctacaagttgttcattctagttttgtttggtgtaagtaggttgtgtgagttaattcatttatatttactatgtctgttaaatcagaaattttttattatctatgttcttctagattttacctgtagttcataaaaaaaaaaaaaaaaaaaaaaaaa

SEQ ID NO: 56 - DNA, 3209 bp, Homo sapiens
gggcactcagggcccagagctcagccttgaccctgacccttgctctccccaatccactccggggctcatgaaggggaacaagctggaggagcaggaccctagacctctgcagcccataccaggtctcatggaggggaacaagctggaggagcaggactctagccctccacagtccactccagggctcatgaaggggaacaagcgtgaggagcaggggctgggccccgaacctgcggcgccccagcagcccacggcggaggaggaggccctgatcgagttccaccgctcctaccgagagctcttcgagttcttctgcaacaacaccaccatccacggcgccatccgcctggtgtgctcccagcacaaccgcatgaagacggccttctgggcagtgctgtggctctgcacctttggcatgatgtactggcaattcggcctgcttttcggagagtacttcagctaccccgtcagcctcaacatcaacctcaactcggacaagctcgtcttccccgcagtgaccatctgcaccctcaatccctacaggtacccggaaattaaagaggagctggaggagctggaccgcatcacagagcagacgctctttgacctgtacaaatacagctccttcaccactctcgtggccggctcccgcagccgtcgcgacctgcgggggactctgccgcaccccttgcagcgcctgagggtcccgcccccgcctcacggggcccgtcgagcccgtagcgtggcctccagcttgcgggacaacaacccccaggtggactggaaggactggaagatcggcttccagctgtgcaaccagaacaaatcggactgcttctaccagacatactcatcaggggtggatgcggtgagggagtggtaccgcttccactacatcaacatcctgtcgaggctgccagagactctgccatccctggaggaggacacgctgggcaacttcatcttcgcctgccgcttcaaccaggtctcctgcaaccaggcgaattactctcacttccaccacccgatgtatggaaactgctatactttcaatgacaagaacaactccaacctctggatgtcttccatgcctggaatcaacaacggtctgtccctgatgctgcgcgcagagcagaatgacttcattcccctgctgtccacagtgactggggcccgggtaatggtgcacgggcaggatgaacctgcctttatggatgatggtggctttaacttgcggcctggcgtggagacctccatcagcatgaggaaggaaaccctggacagacttgggggcgattatggcgactgcaccaagaatggcagtgatgttcctgttgagaacctttacccttcaaagtacacacagcaggtgtgtattcactcctgcttccaggagagcatgatcaaggagtgtggctgtgcctacatcttctatccgcggccccagaacgtggagtactgtgactacagaaagcacagttcctgggggtactgctactataagctccaggttgacttctcctcagaccacctgggctgtttcaccaagtgccggaagccatgcagcgtgaccagctaccagctctctgctggttactcacgatggccctcggtgacatcccaggaatgggtcttccagatgctatcgcgacagaacaattacaccgtcaacaacaagagaaatggagtggccaaagtcaacatcttcttcaaggagctgaactacaaaaccaattctgagtctccctctgtcacgatggtcaccctcctgtccaacctgggcagccagtggagcctgtggttcggctcctcggtgttgtctgtggtggagatggctgagctcgtctttgacctgctggtcatcatgttcctcatgctgctccgaaggttccgaagccgatactggtctccaggccgagggggcaggggtgctcaggaggtagcctccaccctggcatcctcccctccttcccacttctgcccccaccccatgtctctgtccttgtcccagccaggccctgctccctctccagccttgacagcccctccccctgcctatgccaccctgggcccccgcccatctccagggggctctgcaggggccagttcctccacctgtcctctgggggggccctgagagggaaggagaggtttctcacaccaaggcagatgctcctctggtgggagggtgctggccctggcaagattgaaggatgtgcagggcttcctctcagagccgcccaaactgccgttgatgtgtggaggggaagcaagatgggtaagggctcaggaagttgctccaagaacagtagctgatgaagctgcccagaagtgccttggctccagccctgtaccccttggtactgcctctgaacactctggtttccccacccaactgcggctaagtctctttttcccttggatcagccaagcgaaacttggagctttgacaaggaactttcctaagaaaccgctgataaccaggacaaaacacaaccaagggtacacgcaggcatgcacgggtttcctgcccagcgacggcttaagccagcccccgactggcctggccacactgctctccagtagcacagatgtctgctcctcctcttgaacttgggtgggaaaccccacccaaaagccccctttgttacttaggcaattccccttccctgactcccgagggctagggctagagcagacccgggtaagtaaaggcagacccagggctcctctagcctcatacccgtgccctcacagagccatgccccggcacctctgccctgtgtctttcatacctctacatgtctgcttgagatatttcctcagcctgaaagtttccccaaccatctgccagagaactcctatgcatcccttagaaccctgctcagacaccattacttttgtgaacgcttctgccacatcttgtcttccccaaaattgatcactccgccttctcctgggctcccgtagcacactataacatctgctggagtgttgctgttgcaccatactttcttgtacatttgtgtctcccttcccaactagactgtaagtgccttgcggtcagggactgaatcttgcccgtttatgtatgctccatgtctagcccatcatcctgcttggagcaagtaggcaggagctcaataaatgtttgttgcatgaagaaaaaaaaaaaaaaaaaaaaaaaaaaaaaaaaaaaaaaaaaaaaa

SEQ ID NO: 57 - DNA, 943 bp, Homo sapiens
gcagagcccagggagctggaggtcggcgcttcctctcgtgcttggtccactgacgcgcggccccgccgcgaggagcatcagatccatgctgctgctgactcggagccccacagcttggcacaggctctctcagctcaagcctccggtcctccctgggaccctgggaggccaggccctgcatctgaggtcctggcttttgtcaaggcagggccctgcagagacaggtgggcagggccagccccagggccctgggcttcgaacccggctgctgatcacaggcctgttcggggctggactcggtggggcctggctggccctgagggctgagaaggagaggctgcagcagcaaaagcgaacagaagccctgcgccaggcagctgtgggccagggcgacttccacctgctggatcacagaggccgggctcgctgcaaggctgacttccggggccagtgggtgctgatgtactttggcttcactcactgccctgacatctgcccagacgagctggagaagctggtgcaggtggtgcggcagctggaagcagagcctggtttgcctccagtgcagcctgtcttcatcactgtggaccccgagcgggacgacgttgaagccatggcccgctacgtccaggacttccacccaagactgttgggtctgaccggctccaccaaacaggttgcccaggctagtcacagttaccgcgtgtactacaatgccggccccaaggatgaggaccaggactacatcgtggaccactccattgccatctacctgctcaaccctgacggcctcttcacggattactacggccggagcagatcggctgagcagatctcagacagtgtgcggcggcacatggcggctttccgcagtgtcctgtcttgagccactgcagtctgggccccatcattaaacgggctgcgtttaaaaaaaaaaaaaaaa

SEQ ID NO: 58 - DNA, 2998 bp, Homo sapiens
acttttgggacatcctgttctgagtcaagattcctccttctgaacatgggactttccagaaggaccacagctcctcccgtgcatccactcggcctgggaggttctggattttggctgtcgagggagtttgcctgcctctccagagaaagatggtcatgaggcccctgtggagtctgcttctctgggaagccctacttcccattacagttactggtgcccaagtgctgagcaaagtcgggggctcggtgctgctggtggcagcgcgtccccctggcttccaagtccgtgaggctatctggcgatctctctggccttcagaagagctcctggccacgtttttccgaggctccctagagactctgtaccattcccgcttcctgggccgagcccagctacacagcaacctcagcctggagctcgggccgctggagtctggagacagcggcaacttctccgtgttgatggtggacacaaggggccagccctggacccagaccctccagctcaaggtgtacgatgcagtgcccaggcccgtggtacaagtgttcattgctgtagaaagggatgctcagccctccaagacctgccaggttttcttgtcctgttgggcccccaacatcagcgaaataacctatagctggcgacgggagacaaccatggactttggtatggaaccacacagcctcttcacagacggacaggtgctgagcatttccctgggaccaggagacagagatgtggcctattcctgcattgtctccaaccctgtcagctgggacttggccacagtcacgccctgggatagctgtcatcatgaggcagcaccagggaaggcctcctacaaagatgtgctgctggtggtggtgcctgtctcgctgctcctgatgctggttactctcttctctgcctggcactggtgcccctgctcagggaaaaagaaaaaggatgtccatgctgacagagtgggtccagagacagagaacccccttgtgcaggatctgccataaaggacaatatgaactgatgcctggactatcagtaaccccactgcacaggcacacgatgctctgggacataactggtgcctggaaatcaccatggtcctcatatctcccatgggaatcctgtcctgcctcgaaggagcagcctgggcagccatcacaccacgaggacaggaagcaccagcacgtttcacacctcccccttccctctcccatcttctcatatcctggctcttctctgggcaagatgagccaagcagaacattccatccaggacactggaagttctccaggatccagatccatggggacattaatagtccaaggcattccctcccccaccactattcataaagtattaaccaactggcaccaaggaattgcctccagcctgagtcctaggctctaaaagatattacatatttgaactaatagaggaactctgagtcacccatgccagcatcagcttcagccccagaccctgcagtttgagatctgatgcttcctgagggccaaggcattgctgtaagaaaaggtctagaaataggtgaaagtgagaggtgggggacaggggtttctctttctggcctaaggactttcaggtaatcagagttcatgggccctcaaaggtagattgcagttgtagacaccgaggatggttgacaacccatggttgagatgggcaccgttttgcaggaaacaccatattaatagacatcctcaccatctccatccgctctcacgcctcctgcaggatctgggagtgagggtggagagtctttcctcacgctccagcacagtggccaggaaaagaaatactgaatttgccccagccaacaggacgttcttgcacaacttcaagaaaagcagctcagctcaggatgagtcttcctgcctgaaactgagagagtgaagaaccataaaacgctatgcagaaggaacattatggagagaaagggtactgaggcactctagaatctgccacattcattttcaaatgcaaatgcagaagacttaccttagttcaaggggaggggacaaagaccccacagcccaacagcaggactgtagaggtcactctgactccatcaaactttttattgtggccatcttaggaaaatacattctgcccctgaatgattctgtctagaaaagctctggagtattgatcactactggaaaaacacttaaggagctaaacttaccttcggggattattagctgataaggttcacagtttctctcacccaggtgtaactggattttttctggggcctcaatccagtcttgataacagcgaggaaagaggtattgaagaaacaggggtgggtttgaagtactattttcccagggtggcttcaatctccccacctaggatgtcagccctgtccaaggaccttccctcttctccccagttcctgggcaatcacttcaccttggacaaaggatcagcacagctggcctccagatccacatcaccactcttccactcgattgttcccagatcctccctgcctggcctgctcagaggttccctgttggtaacctggctttatcaaattctcatccctttcccacacccacttctctcctatcaccttcccccaagattacctgaacagggtccatggccactcaacctgtcagcttgcaccatccccacctgccacctacagtcaggccacatgcctggtcactgaatcatgcaaaactggcctcagtccctaaaaatgatgtggaaaggaaagcccaggatctgacaatgagccctggtggatttgtggggaaaaaatacacagcactccccacctttctttcgttcatctccagggccccacctcagatcaaagcagctctggatgagatgggacctgcagctctccctccacaaggtgactcttagcaacctcatttcgacagtggtttgtagcgtggtgcaccagggccttgttgaacagatccacactgctctaataaagttcccatccttaatgaag

SEQ ID NO: 59 - DNA, 4950 bp, Homo sapiens
cagagcagggtggagagggcggtgggaggcgtgtgcctgagtgggctctactgccttgttccatattattttgtgcacattttccctggcactctgggttgctagccccgccgggcactgggcctcagacactgcgcggttccctcggagcagcaagctaaagaaagcccccagtgccggcgaggaaggaggcggcggggaaagatgcgcggcgttggctggcagatgctgtccctgtcgctggggttagtgctggcgatcctgaacaaggtggcaccgcaggcgtgcccggcgcagtgctcttgctcgggcagcacagtggactgtcacgggctggcgctgcgcagcgtgcccaggaatatcccccgcaacaccgagagactggatttaaatggaaataacatcacaagaattacgaagacagattttgctggtcttagacatctaagagttcttcagcttatggagaataagattagcaccattgaaagaggagcattccaggatcttaaagaactagagagactgcgtttaaacagaaatcaccttcagctgtttcctgagttgctgtttcttgggactgcgaagctatacaggcttgatctcagtgaaaaccaaattcaggcaatcccaaggaaagctttccgtggggcagttgacataaaaaatttgcaactggattacaaccagatcagctgtattgaagatggggcattcagggctctccgggacctggaagtgctcactctcaacaataacaacattactagactttctgtggcaagtttcaaccatatgcctaaacttaggacttttcgactgcattcaaacaacctgtattgtgactgccacctggcctggctctccgactggcttcgccaaaggcctcgggttggtctgtacactcagtgtatgggcccctcccacctgagaggccataatgtagccgaggttcaaaaacgagaatttgtctgcagtggtcaccagtcatttatggctccttcttgtagtgttttgcactgccctgccgcctgtacctgtagcaacaatatcgtagactgtcgtgggaaaggtctcactgagatccccacaaatcttccagagaccatcacagaaatacgtttggaacagaacacaatcaaagtcatccctcctggagctttctcaccatataaaaagcttagacgaattgacctgagcaataatcagatctctgaacttgcaccagatgctttccaaggactacgctctctgaattcacttgtcctctatggaaataaaatcacagaactccccaaaagtttatttgaaggactgttttccttacagctcctattattgaatgccaacaagataaactgccttcgggtagatgcttttcaggatctccacaacttgaaccttctctccctatatgacaacaagcttcagaccatcgccaaggggaccttttcacctcttcgggccattcaaactatgcatttggcccagaacccctttatttgtgactgccatctcaagtggctagcggattatctccataccaacccgattgagaccagtggtgcccgttgcaccagcccccgccgcctggcaaacaaaagaattggacagatcaaaagcaagaaattccgttgttcagctaaagaacagtatttcattccaggtacagaagattatcgatcaaaattaagtggagactgctttgcggatctggcttgccctgaaaagtgtcgctgtgaaggaaccacagtagattgctctaatcaaaagctcaacaaaatcccggagcacattccccagtacactgcagagttgcgtctcaataataatgaatttaccgtgttggaagccacaggaatctttaagaaacttcctcaattacgtaaaataaactttagcaacaataagatcacagatattgaggagggagcatttgaaggagcatctggtgtaaatgaaatacttcttacgagtaatcgtttggaaaatgtgcagcataagatgttcaagggattggaaagcctcaaaactttgatgttgagaagcaatcgaataacctgtgtggggaatgacagtttcataggactcagttctgtgcgtttgctttctttgtatgataatcaaattactacagttgcaccaggggcatttgatactctccattctttatctactctaaacctcttggccaatccttttaactgtaactgctacctggcttggttgggagagtggctgagaaagaagagaattgtcacgggaaatcctagatgtcaaaaaccatacttcctgaaagaaatacccatccaggatgtggccattcaggacttcacttgtgatgacggaaatgatgacaatagttgctccccactttctcgctgtcctactgaatgtacttgcttggatacagtcgtccgatgtagcaacaagggtttgaaggtcttgccgaaaggtattccaagagatgtcacagagttgtatctggatggaaaccaatttacactggttcccaaggaactctccaactacaaacatttaacacttatagacttaagtaacaacagaataagcacgctttctaatcagagcttcagcaacatgacccagctcctcaccttaattcttagttacaaccgtctgagatgtattcctcctcgcacctttgatggattaaagtctcttcgattactttctctacatggaaatgacatttctgttgtgcctgaaggtgctttcaatgatctttctgcattatcacatctagcaattggagccaaccctctttactgtgattgtaacatgcagtggttatccgactgggtgaagtcggaatataaggagcctggaattgctcgttgtgctggtcctggagaaatggcagataaacttttactcacaactccctccaaaaaatttacctgtcaaggtcctgtggatgtcaatattctagctaagtgtaacccctgcctatcaaatccgtgtaaaaatgatggcacatgtaatagtgatccagttgacttttaccgatgcacctgtccatatggtttcaaggggcaggactgtgatgtcccaattcatgcctgcatcagtaacccatgtaaacatggaggaacttgccacttaaaggaaggagaagaagatggattctggtgtatttgtgctgatggatttgaaggagaaaattgtgaagtcaacgttgatgattgtgaagataatgactgtgaaaataattctacatgtgtcgatggcattaataactacacatgcctttgcccacctgagtatacaggtgagttgtgtgaggagaagctggacttctgtgcccaggacctgaacccctgccagcacgattcaaagtgcatcctaactccaaagggattcaaatgtgactgcacaccagggtacgtaggtgaacactgcgacatcgattttgacgactgccaagacaacaagtgtaaaaacggagcccactgcacagatgcagtgaacggctatacgtgcatatgccccgaaggttacagtggcttgttctgtgagttttctccacccatggtcctccctcgtaccagcccctgtgataattttgattgtcagaatggagctcagtgtatcgtcagaataaatgagccaatatgtcagtgtttgcctggctatcagggagaaaagtgtgaaaaattggttagtgtgaattttataaacaaagagtcttatcttcagattccttcagccaaggttcggcctcagacgaacataacacttcagattgccacagatgaagacagcggaatcctcctgtataagggtgacaaagaccatatcgcggtagaactctatcgggggcgtgttcgtgccagctatgacaccggctctcatccagcttctgccatttacagtgtggagacaatcaatgatggaaacttccacattgtggaactacttgccttggatcagagtctctctttgtccgtggatggtgggaaccccaaaatcatcactaacttgtcaaagcagtccactctgaattttgactctccactctatgtaggaggcatgccagggaagagtaacgtggcatctctgcgccaggcccctgggcagaacggaaccagcttccacggctgcatccggaacctttacatcaacagtgagctgcaggacttccagaaggtgccgatgcaaacaggcattttgcctggctgtgagccatgccacaagaaggtgtgtgcccatggcacatgccagcccagcagccaggcaggcttcacctgcgagtgccaggaaggatggatggggcccctctgtgaccaacggaccaatgacccttgccttggaaataaatgcgtacatggcacctgcttgcccatcaatgcgttctcctacagctgtaagtgcttggagggccatggaggtgtcctctgtgatgaagaggaggatctgtttaacccatgccaggcgatcaagtgcaagcacgggaagtgcaggctttcaggtctggggcagccctactgtgaatgcagcagtggatacacgggggacagctgtgatcgagaaatctcttgtcgaggggaaaggataagagattattaccaaaagcagcagggctatgctgcttgccaaacaaccaagaaggtgtcccgattagagtgcagaggtgggtgtgcaggagggcagtgctgtggaccgctgaggagcaagcggcggaaatactctttcgaatgcactgacggctcctcctttgtggacgaggttgagaaagtggtgaagtgcggctgtacgaggtgtgtgtcctaaacacactcccggcagctctgtctttggaaaaggttgtatacttcttgaccatgtgggactaatgaatgcttcatagtggaaatatttgaaatatattgtaaaatacagaacagacttatttttattatgagaataaagactttttttctgcatttg

SEQ ID NO: 60 - DNA, 5400 bp, Homo sapiens
ccgccaagcatattgctaggcacagagcaggtgtgcaacaaaagttatttctcaggctttccctcctctgagcgccgtcctccagagggtccggagtgtagctgggggttggagcagcagcctcctaggcgatgggacagagcccacagggtccggtatgccacggtttcttcgtcagaccctgggaatccaacgtcgcaaaataaacacggccgcgccgctaatcgccagttcggaggaaacaaaacagcgctgcgctgggggatctgggcaaaatcagccctccctcctcccgctccttcgccgcggccctcccctcctcgcgctgctctcgttcgcttggctcagctcagctcagctcagcgcagctccgcggccgccaagccgaggcgggcacggtctccgagtcgcggacgccagctccgagctccctctctccgccgcgcctccgccaggtcgcgccttcgtcgggaccacttcgggcaggagtcgcgtggcgaaggcctgcggccgcggcacaaagttgggggccgcgaagatgaggctgtccccggcgcccctgaagctgagccggactccggcactgctggccctggcgctgcccctggccgcggcgctggccttctccgacgagaccctggacaaagtgcccaagtcagagggctactgcagccgtatcctgcgcgcccagggcacgcggcgcgagggctacaccgagttcagcctccgcgtggagggcgaccccgacttctacaagccgggaaccagctaccgcgtaacactttcagctgctcctccctcctacttcagaggattcacattaattgccctcagagagaacagagagggtgataaggaagaagaccatgctgggaccttccagatcatagacgaagaagaaactcagtttatgagcaattgccctgttgcagtcactgaaagcactccacggaggaggacccggatccaggtgttttggatagcaccaccagcgggaacaggctgcgtgattctgaaggccagcatcgtacaaaaacgcattatttattttcaagatgagggctctctgaccaagaaactttgtgaacaagattccacatttgatggggtgactgacaaacccatcttagactgctgtgcctgcggaactgccaagtacagactcacattttatgggaattggtccgagaagacacacccaaaggattaccctcgtcgggccaaccactggtctgcgatcatcggaggatcccactccaagaattatgtactgtgggaatatggaggatatgccagcgaaggcgtcaaacaagttgcagaattgggctcacccgtgaaaatggaggaagaaattcgacaacagagtgatgaggtcctcaccgtcatcaaagccaaagcccaatggccagcctggcagcctctcaacgtgagagcagcaccttcagctgaattttccgtggacagaacgcgccatttaatgtccttcctgaccatgatgggccctagtcccgactggaacgtaggcttatctgcagaagatctgtgcaccaaggaatgtggctgggtccagaaggtggtgcaagacctgattccctgggacgctggcaccgacagcggggtgacctatgagtcacccaacaaacccaccattccccaggagaaaatccggcccctgaccagcctggaccatcctcagagtcctttctatgacccagagggtgggtccatcactcaagtagccagagttgtcatcgagagaatcgcacggaagggtgaacaatgcaatattgtacctgacaatgtcgatgatattgtagctgacctggctccagaagagaaagatgaagatgacacccctgaaacctgcatctactccaactggtccccatggtccgcctgcagctcctccacctgtgacaaaggcaagaggatgcgacagcgcatgctgaaagcacagctggacctcagcgtcccctgccctgacacccaggacttccagccctgcatgggccctggctgcagtgacgaagacggctccacctgcaccatgtccgagtggatcacctggtcgccctgcagcatctcctgcggcatgggcatgaggtcccgggagaggtatgtgaagcagttcccggaggacggctccgtgtgcacgctgcccactgaggaaacggagaagtgcacggtcaacgaggagtgctctcccagcagctgcctgatgaccgagtggggcgagtgggacgagtgcagcgccacctgcggcatgggcatgaagaagcggcaccgcatgatcaagatgaaccccgcagatggctccatgtgcaaagccgagacatcacaggcagagaagtgcatgatgccagagtgccacaccatcccatgcttgctgtccccatggtccgagtggagtgactgcagcgtgacctgcgggaagggcatgcgaacccgacagcggatgctcaagtctctggcagaacttggagactgcaatgaggatctggagcaggtggagaagtgcatgctccctgaatgccccattgactgtgagctcaccgagtggtcccagtggtcggaatgtaacaagtcatgtgggaaaggccacgtgattcgaacccggatgatccaaatggagcctcagtttggaggtgcaccctgcccagagactgtgcagcgaaaaaagtgccgcatccgaaaatgccttcgaaatccatccatccaaaagctacgctggagggaggcccgagagagccggcggagtgagcagctgaaggaagagtctgaaggggagcagttcccaggttgtaggatgcgcccatggacggcctggtcagaatgcaccaaactgtgcggaggtggaattcaggaacgttacatgactgtaaagaagagattcaaaagctcccagtttaccagctgcaaagacaagaaggagatcagagcatgcaatgttcatccttgttagcaagggtacgagttccccagggctgcactctagattccagagtcaccaatggctggattatttgcttgtttaagacaatttaaattgtgtacgctagttttcatttttgcagtgtggttcgcccagtagtcttgtggatgccagagacatcctttctgaatacttcttgatgggtacaggctgagtggggcgccctcacctccagccagcctcttcctgcagaggagtagtgtcagccaccttgtactaagctgaaacatgtccctctggagcttccacctggccagggaggacggagactttgacctactccacatggagaggcaaccatgtctggaagtgactatgcctgagtcccagggtgcggcaggtaggaaacattcacagatgaagacagcagattccccacattctcatctttggcctgttcaatgaaaccattgtttgcccatctcttcttagtggaactttaggtctcttttcaagtctcctcagtcatcaatagttcctggggaaaaacagagctggtagacttgaagaggagcattgatgttgggtggcttttgttctttcactgagaaattcggaatacatttgtctcacccctgatattggttcctgatgcccccccaacaaaaataaataaataaattatggctgctttatttaaatataaggtagctagtttttacacctgagataaataataagcttagagtgtatttttcccttgcttttgggggttcagaggagtatgtacaattcttctgggaagccagccttctgaactttttggtactaaatccttattggaaccaagacaaaggaagcaaaattggtctctttagagaccaatttgcctaaattttaaaatcttcctacacacatctagacgttcaagtttgcaaatcagtttttagcaagaaaacatttttgctatacaaacattttgctaagtctgcccaaagcccccccaatgcattccttcaacaaaatacaatctctgtactttaaagttattttagtcatgaaattttatatgcagagagaaaaagttaccgagacagaaaacaaatctaagggaaaggaatattatgggattaagctgagcaagcaattctggtggaaagtcaaacctgtcagtgctccacaccagggctgtggtcctcccagacatgcataggaatggccacaggtttacactgccttcccagcaattataagcacaccagattcagggagactgaccaccaagggatagtgtaaaaggacattttctcagttgggtccatcagcagtttttcttcctgcatttattgttgaaaactattgtttcatttcttcttttataggccttattactgcttaatccaaatgtgtaccattggtgagacacatacaatgctctgaatacactacgaatttgtattaaacacatcagaatatttccaaatacaacatagtatagtcctgaatatgtacttttaacacaagagagactattcaataaaaactcactgggtctttcatgtctttaagctaagtaagtgttcagaaggttcttttttatattgtcctccacctccatcattttcaataaaagatagggcttttgctcccttgttcttggagggaccattattacatctctgaactacctttgtatccaacatgttttaaatccttaaatgaattgctttctcccaaaaaaagcacaatataaagaaacacaagatttaattatttttctacttggggggaaaaaagtcctcatgtagaagcacccacttttgcaatgttgttctaagctatctatctaactctcagcccatgataaagttccttaagctggtgattcctaatcaaggacaagccaccctagtgtctcatgtttgtatttggtcccagttgggtacattttaaaatcctgattttggagacttaaaaccaggttaatggctaagaatgggtaacatgactcttgttggattgttattttttgtttgcaatggggaatttataagaagcatcaagtctctttcttaccaaagtcttgttaggtggtttatagttcttttggctaacaaatcattttggaaataaagattttttactacaaaaatgaaatttgtttggacttccacttgagacagtaaagagagtattagacacccagtaaaaactgccatataaagaagttgtaattgtttgttgtgtatgtatttttttcaatgccaaaccagctgtgatccaatttacatccacattttaggtccaacagcaagaagttcagagagagatttcccaaccagacattgggtcactcactggtcaccttgccagtgcattttattagaagggaatctgttgtagcaaatgggaataaacctgggtttctatagacccagaactgaaaaaataaaaaaaaaaaaaaaaaa

SEQ ID NO: 61 - DNA, 4934 bp, Homo sapiens
gcgagctgagctgacagcgcggagctggcgctgtggagcgcagggagccttgccggttcctccgaccggcgtctgcgagtacagcggcggctaacctgccccggcttcaggatttacacagacgtggggcgatgcttgtgaccctgcagctcctcaaaccagcctgtattgagcggtttgcagcctgatgctcagccccctccccacagggcccctagaagcctgtttctccgtacagtccaggacctccagccccatggagcccccgatcccacagagcgcccccttgactcccaactcagtcatggtccagccccttcttgacagccggatgtcccacagccggctccagcacccactcaccatcctacccattgaccaggtgaagaccagccatgtggagaatgactacatagacaaccctagcctggccctgaccaccggcccaaagcggacccggggcggggccccagagctggccccgacgcccgcccgctgtgaccaggatgtcacccaccattggatctccttcagcgggcgccccagctctgtgagcagcagcagcagcacatcctctgaccaacggctcttagaccacatggcaccaccacccgtggctgaccaggcctcaccaagggctgtgcgcatccagcccaaggtggtccactgccagccgctggacctcaagggcccggcggtcccacccgagctggacaagcacttcttgctgtgcgaggcctgtgggaagtgtaaatgcaaggagtgtgcatccccccggacgttgccttcctgctgggtctgcaaccaggagtgcctgtgctcagcccagactctggtcaactatggcacgtgcatgtgtttggtgcagggcatcttctaccactgcacgaatgaggacgatgagggctcctgcgctgaccacccctgctcctgctcccgctccaactgctgcgcccgctggtccttcatgggtgctctctccgtggtgctgccctgcctgctctgctacctgcctgccaccggctgcgtgaagctggcccagcgtggctacgaccgtctgcgccgccctggttgccgctgcaagcacacgaacagcgtcatctgcaaagcagccagcggggatgccaagaccagcaggcccgacaagcctttctgacagtttgtgtcgaagccccagtgctctgcctggaaacctggttctcttctgacatctaagaagactgcagcaaggtcagaggttttagcctcctgaggctgaccttgctagtctgcccactccctacccccagcttcggaaaatacagagaccaccaccacgtaccctgtattccccaaggtgatgaagaagcactttggggctttttttcagggtcctgaaactttgtgtcaaacagacaatgcaggggcagggtgtggtttggggggaaatttttctttttcagaagacagaacacagatgtggacacatatccggaaactgcagctgcttgaatgccttcccagcccctccttctccctccctccctccgccccccccttcctcttttccattgtctttggctctcacaggagctagctgcctgggaggaattgttaactgagtaccagggtacctttaaagaagacccttggagtcttctataccttcttctccttccccatctcactccaccccactttgtccctgatgtcttggggaaggtgtagaacaccctagcagttcctattgtatatacttgggagccactgagaacagaggacggccagtgagtccaagcctcgttcctccttctgcctccccggagccacaggatggatttaggagccactgctcagtgcacttctcccttccaactgcatcaactaactctcgggggtgttctgctcaccacaccgtccttcggttcttactgagtcacagactcgcctgcccactacgtgtcctgggttctctactcagatcccttccagaaactttatatgggtagaggaagccagggcggcaaatgcgagaccaaatatcattttgccaatgagtctgaggctgtggtctctggatccagtcattatgtttttatagaataattaaaccggatgctaacggtgttttaaaaaataataataaaacaacttgtttccttttggccacccccaggaagggctgatttcaaaatctgggggcgagcaacctcaaggaacacaatttccctccctatcaacaagaggattttaacagcaaagaagagaggcagcacctcccattggcagaatgaccgctgagccaggctgggtttgggtttcttctcttctgattctgctgctcactgtcatagccttttgtgtatagtgatgtgtctgtatctttaatgtaaatagagagatgatgaaaaaagagtctattttagtgttaggaagccccagcaggggagtcggaagagcttggaagagctggggagagggtaggggaaaggtttttccaggggccactgggtttgagccctgcttctgtgcacagccacaccaccctctcccgacagccctcaaagacgtagcaactctttctctcaaggtgctaaaggactcagaaggtgcagcacgtccagtgggtaggtacttgttgcatgcaaaagctgtagtgtatctggtccttcctccccagcttttgtgtggggttcttgctttgtgtggtattttgttttcccctctaatgagagggcatggcctgagtcagaagagctaccccaggtgaaactggaagtgcatgaggcagagcgtccgtagcatttccagtttgttctgtataggacagaggtgcctccgggaaggaggcagcgaggtaggtagctatgataggcacctaatgcttctcaaggacttattttttccttcttgaagactagtagtaacatcttatgatttagagtaagttgattgtaaccataggtatttattgattggaggaagggagggtcatattattttcggctttatttatgtaacatttgctagcttataaaaggcgaatgtgaaatattgcatctgcattttccaaggctgattcgtgtagctacccttgccacagttgtgacggatgtatggatgttcttgaacatttcagaaggagtggtagaaaaaaacacacattcagccaaccacttatatgaattgaatgtatcagaagtgtactgaagggactggagatggttttcctcagatgagggggccccaaaattgatagtgcacatctgcacgctttctgcgaggcctcagaacttttcccagggcccctccctcaaattgtctccatgggaaacttgacccagtggcaagttgcactttggtgatcttggtggtctacacacccgttctgtggagagtcgatttacataagctgtgtatacacacacacacacacacacacacacacacacacacacacccctaccccacactgactgtctaccgacagagaccctatttcctggcaaacggcctcctgaaccctgactttttgtgtacatacttgtaaacacggatttttctgggttttggtttgctttttccttttttccccctgcccctgttctagcttgttcttcttggtttgctttcaacctgcttgatggatgtctgcagagtgctctctaagagtccacctcagtgcctcgtgtgctcagtggtcatgggaaggagcgaaggaaccatccttggttctcccagcttggttgtgtagcaatccctcagcattgtttttctcagcttcttggcaaaaattaaaacaacaacaacaacaacaacaacaacaacaaacagaaggataaactggcttgcctgtggaccctccccggctctggggccagtcgagagccactgagggacccagcactcagagacacaacacacatgtgtagctgcttctggctgagtgtgtttcctgtcaccaatggcctgtttggctggacgatgcctcggcttgaccttttttgaaaagtgctggttagttcccgccccctggtaaacctggggtaggtgggggttctgtcttaactcgaggggcacctgggatccaggacgcttctagggggctctggctgcccgtgttaatgaaggacagcgcttccgcgagcaccctgggaactgggtcttgggtagcaaagccctcccagagaaaagatgggcacaactaaggctttcctgagcaggaagggggtgaagaccaatcccttcctttggtcctttggtacgcaccccctcagagctgagatggaagacatggctagttcttttcagccttgtggagcctgtcagtcgccatcatacctcgagtgaggcccagctagataatgacttgtccaagatggcacacgtggaaagttgatctgcaccagaacccggatgactgtcaccttgaagcgtcctgttctccttctgtgctgtcccaggaagtgtctggcgggcgtgggcagcacagctctacactgtacgattcactagggcatcctgcgagcctcactagccttctggttcatgcctttgacaagcatttttgtgccccctctgcttactgtgacagtcgatgatgaatcttgcgttgccattttctgctgtgggtaactgcgtgcagtgtcttgccttgctttctcttcttactgtcccacagcttggtttcatgttacaaacagaaaagctcgaggctcccaccccgccacatcccaacttcatttccccctcactgtagcccatttccaccccaccacaaagttgccacaggttttctttgtatagaatatttattttgaagctctattttaatagtatttattttagaaagtctactattgtaagagttcttctgtttgtgaagaaaaaaacaagttaaaaactgaatgtactgatttagaaaatatatataaatatatattgttaaatataaa

SEQ ID NO: 62 - DNA, 1947 bp, Homo sapiens
catccctgccattgccgggcactcgcggcgctgctaacggcctggtcacatgctctccggagagctacgggagggcgctgggtaacctctatccgagccgcggccgcgaggaggagggaaaaggcgagcaaaaaggaagagtgggaggaggaggggaagcggcgaaggaggaagaggaggaggaggaagaggggagcacaaaggatccaggtctcccgacgggaggttaataccaagaaccatgtgtgccgagcggctgggccagttcatgaccctggctttggtgttggccacctttgacccggcgcgggggaccgacgccaccaacccacccgagggtccccaagacaggagctcccagcagaaaggccgcctgtccctgcagaatacagcggagatccagcactgtttggtcaacgctggcgatgtggggtgtggcgtgtttgaatgtttcgagaacaactcttgtgagattcggggcttacatgggatttgcatgacttttctgcacaacgctggaaaatttgatgcccagggcaagtcattcatcaaagacgccttgaaatgtaaggcccacgctctgcggcacaggttcggctgcataagccggaagtgcccggccatcagggaaatggtgtcccagttgcagcgggaatgctacctcaagcacgacctgtgcgcggctgcccaggagaacacccgggtgatagtggagatgatccatttcaaggacttgctgctgcacgaaccctacgtggacctcgtgaacttgctgctgacctgtggggaggaggtgaaggaggccatcacccacagcgtgcaggttcagtgtgagcagaactggggaagcctgtgctccatcttgagcttctgcacctcggccatccagaagcctcccacggcgccccccgagcgccagccccaggtggacagaaccaagctctccagggcccaccacggggaagcaggacatcacctcccagagcccagcagtagggagactggccgaggtgccaagggtgagcgaggtagcaagagccacccaaacgcccatgcccgaggcagagtcgggggccttggggctcagggaccttccggaagcagcgagtgggaagacgaacagtctgagtattctgatatccggaggtgaaatgaaaggcctggccacgaaatctttcctccacgccgtccattttcttatctatggacattccaaaacatttaccattagagaggggggatgtcacacgcaggattctgtggggactgtggacttcatcgaggtgtgtgttcgcggaacggacaggtgagatggagacccctggggccgtggggtctcaggggtgcctggtgaattctgcacttacacgtactcaagggagcgcgcccgcgttatcctcgtacctttgtcttctttccatctgtggagtcagtgggtgtcggccgctctgttgtgggggaggtgaaccagggaggggcagggcaaggcagggcccccagagctgggccacacagtgggtgctgggcctcgccccgaagcttctggtgcagcagcctctggtgctgtctccgcggaagtcagggcggctggattccaggacaggagtgaatgtaaaaataaatatcgcttagaatgcaggagaagggtggagaggaggcaggggccgagggggtgcttggtgccaaactgaaattcagtttcttgtgtggggccttgcggttcagagctcttggcgagggtggagggaggagtgtcatttctatgtgtaatttctgagccattgtactgtctgggctgggggggacactgtccaagggagtggcccctatgagtttatattttaaccactgcttcaaatctcgatttcactttttttatttatccagttatatctacatatctgtcatctaaataaatggctttcaaacaaaaaaaaaaaaaaaaaa

SEQ ID NO: 63 - DNA, 3993 bp, Homo sapiens
agtcatcacaagcctgttcggcgggactgtgatggccagagagatgacgatcttaggatcggctgttttgactctcctgttggccggctatttggcacaacagtatttaccattgcctactcctaaagtgattggtattgatcttggcaccacctattgttctgttggggtgttttttcctggcacaggaaaagtaaaggtgattccagatgaaaatgggcatatcagcatacccagcatggtgtcttttactgacaatgatgtatatgtgggatatgaaagcgtagagctggcagattcaaatcctcaaaacacaatatatgatgccaaaagattcataggcaagatttttaccgcagaagagttggaggctgaaattggcagatacccatttaaggttttaaacaaaaatggaatggttgagttttctgtgacaagtaatgagaccatcacagtgtccccagaatatgttggctctcgactattgttgaagttaaaggaaatggcagaggcatatcttggaatgccagttgccaatgctgtcatttctgtaccagcagaatttgatctaaaacagagaaattcaacaattgaagctgctaaccttgcaggactgaagattttgagggtaataaatgaacccacagcagcagctatggcctatggtctccacaaggctgacgtcttccacgtcttggtgatagacttgggcggaggaactctagatgtgtctttactgaataaacaaggagggatgtttctaacccgagcaatgtctggaaacaataaacttggaggacaggacttcaatcagagattgcttcagtacttatataaacagatctatcaaacatatggcttcgtgccctctaggaaagaggaaatccacagattgagacaagctgtggaaatggtcaaattaaatctgactcttcatcaatctgctcagttgtcagtattactaacggtggaggagcaggacaggaaggaacctcacagtagtgacactgaactgccaaaagacaaactttcctcagcagatgaccatcgcgtgaacagtgggtttggacgtggcctttctgataagaaaagtggagaaagtcaggttttatttgaaacagaaatatcacggaaactctttgatacccttaatgaagacctctttcagaaaatactggtacccattcagcaagtattgaaagaaggccacctggaaaagactgagattgatgaggtggttttagttgggggctccactcgtattcctcggatccgtcaagtcattcaagagttctttggaaaagatcccaacacatctgtagaccctgacctagcagtagtaacgggagtggctatccaagcagggattgatggaggcttttggcctctccaagtcagtgctttagaaattcccaataagcatttacaaaaaaccaacttcaactgaattctgcagaaataatggttatttgtgaacttgtctgatgatctcttcccatttatcagattaccttttccacaaaagaaagtctctaaaatatcacagatttacctagagggcaacatttagatacaggaaaattttacatagtgttttgtcttaggattagacgtgaccagattgatcctgtttgattttggagagatcctattctaacaaatactctaaaatgataaaattgaggtacaactctcttaaaagagtatggataactatattttctggattctggaggttgataaccatatgcacttaacattatattctataaacattaagtagtgccagttatgagattcccagttcttactaaattgtattagcaggagctggtaattacttgtattatcacatgtaactaataatttgaactatacttgaaggaccgtgttgatgtcaggtatttacagtggttggaagatagcagtattattagcataagctgcatacgtaatattcagtaactgccatattatataacaaatttacattcacaaattcagtatcctgttaagtgtcatattcttgtaatctgcattctccaggagttttatgtgtttaatagatgaatttattttatttctaaaggtattcaaatgtttcagcaccatatagtagaaatacccaattatattctagttcctttatgtcctgtacatcattctctgcttggatttccattattctgtttggttagagaataaaatcggtaattgcatttgaagaatgtgttaatgtcataataaagccatgattgctatcttatttttgttatccaagacctttgcaaacattggcaaatagcatcaattacctactgtatttgtttctttgtttatattttcagtaagccctggggaatatagcatggaattgagctactaaatggttttggttccgttttacggagatttttcctcatatttagttttgaatgaggaaaatgtgctcaattataaaagctgtgttattgttttctattattatttttaaataatcacacttggactcttttcaaacattaggttagtttgtaatgaaagcaaaaaatttgtgaatactggaagtaacgtggaaatctaatgtggaagccattgtggcaaggtttctacaaatcggcatttggagcagagttgtttgtttttgttgtttgtttcctttaagaaaaaccacagggaccaagaaagaaaatataacagtttgatttctgtcatacccattgtatttgaagatatatggatacagattatatatatatatacatattttccttaatagaggaatgcttcgtattattcaaaaattatatcctgatcacctttttttgttttttattgtaaagtatctctgcttcatccattgctgaattcgataggatgttgaaatgctggtcaccaaaaaaggaaactgagcaaattcatttcaacaacatcaaaacttcagcttctcatagtaaaaagctgaatgttactaatatttttcatatctaaaaaagaattcttagcaatgaaattgctgttaaaacacaaatttcaatcaaatacttttgtgtatagaaaatatgtatagtaggtagatagaaaagtataaaatgtttgttgaagtatcttattttagaatgaatggagaaatgccaaagatgaatccttcactgcattatgaaaatatttcacatgttctcttggactttatataaatctgtaatagattttagaattgaaaaattctttgtgaaggtcttctaaaagtgttccaatttatctcaaaatctccatatataggatcagcttaaaacataaagaaaaccttgaatttctcaaatgtttgagatgttcaagacagtctcttaatccgttaatgcttttggaaacaattgacaaaatagggcaggcagctcatctcatgtcctgaagttggaatttaaataattcctatttgcaaattagaatgacagtgttggaatttggaggcagtagttgagcatattctctagtatatagctacacctttaataaaatgaaggaatgtcttcaatcatattttagtgggctatttataaatagtcttgaagtcaatttagtttatttatttaaaagataatgcatcctgaaagggatcatttatgaataacaatctgaagtcttttcataaaaaaaattaataaactttagttgtacatttagccagcgttatttgaagtatgtaacttttaaaatattaagtgtcttgtatgattagaatatgtgaatgagtaacttattttgtatcaggaatgttttggtactgtgttttcactcaaaccactgacttaacagatactgctgtgtataacatgtactaaatattacagttattgtgcataacagattgttcctcttatatttgtgtgtatacaggcaattcatgttttaatgtaaataaataccattttgcagtttgttttttaaaaaaaaaaaaaaaaaaaaaaaaaaaaaataaaaaaaaaaaaaaaa

SEQ ID NO: 64 - DNA, 1458 bp, Homo sapiens
ccttcggcgagcgagcaccttcgacgcggtccggggaccccctcgtcgctgtcctcccgacgcggacccgcgtgccccaggcctcgcgctgcccggccggctcctcgtgtcccactcccggcgcacgccctcccgcgagtcccgggcccctcccgcgcccctcttctcggcgcgcgcgcagcatggcgcccccgcaggtcctcgcgttcgggcttctgcttgccgcggcgacggcgacttttgccgcagctcaggaagaatgtgtctgtgaaaactacaagctggccgtaaactgctttgtgaataataatcgtcaatgccagtgtacttcagttggtgcacaaaatactgtcatttgctcaaagctggctgccaaatgtttggtgatgaaggcagaaatgaatggctcaaaacttgggagaagagcaaaacctgaaggggccctccagaacaatgatgggctttatgatcctgactgcgatgagagcgggctctttaaggccaagcagtgcaacggcacctccacgtgctggtgtgtgaacactgctggggtcagaagaacagacaaggacactgaaataacctgctctgagcgagtgagaacctactggatcatcattgaactaaaacacaaagcaagagaaaaaccttatgatagtaaaagtttgcggactgcacttcagaaggagatcacaacgcgttatcaactggatccaaaatttatcacgagtattttgtatgagaataatgttatcactattgatctggttcaaaattcttctcaaaaaactcagaatgatgtggacatagctgatgtggcttattattttgaaaaagatgttaaaggtgaatccttgtttcattctaagaaaatggacctgacagtaaatggggaacaactggatctggatcctggtcaaactttaatttattatgttgatgaaaaagcacctgaattctcaatgcagggtctaaaagctggtgttattgctgttattgtggttgtggtgatagcagttgttgctggaattgttgtgctggttatttccagaaagaagagaatggcaaagtatgagaaggctgagataaaggagatgggtgagatgcatagggaactcaatgcataactatataatttgaagattatagaagaagggaaatagcaaatggacacaaattacaaatgtgtgtgcgtgggacgaagacatctttgaaggtcatgagtttgttagtttaacatcatatatttgtaatagtgaaacctgtactcaaaatataagcagcttgaaactggctttaccaatcttgaaatttgaccacaagtgtcttatatatgcagatctaatgtaaaatccagaacttggactccatcgttaaaattatttatgtgtaacattcaaatgtgtgcattaaatatgcttccacagtaaaatctgaaaaactgaaaaaaaaaaaaaa

SEQ ID NO: 65 - DNA, 2136 bp, Homo sapiens
cccacgcgtccgccacctcccacccgcctcttggctcctctcctctaggccgtcgctttcgggttctctcatcgcttcgtcgttcgccaatgtttgaggagaaggccagcagtccttcagggaagatgggaggcgaggagaagccgattggtgctggtgaagagaagcaaaaggaaggaggcaaaaagaagaacaaagaaggatctggagatggaggtcgagctgagttgaatccttggcctgaatatatttacacacgtcttgagatgtataatatactaaaagcagaacatgattccattctggcagaaaaggcagaaaaagatagcaagccaattaaagtcactttgcctgatggtaaacaggttgatgcggaatcttggaaaactacaccatatcaaattgcctgtggaattagtcaaggcctggccgacaacaccgttattgctaaagtaaataatgttgtgtgggacctggaccgccctctggaagaagattgtaccttggagcttctcaagtttgaggatgaggaagctcaggcagtgtattggcactctagtgctcacataatgggtgaagccatggaaagagtctatggtggatgtttatgctacggtccgccaatagaaaatggattctattatgacatgtacctcgaagaagggggtgtgtctagcaatgatttctcttctctggaggctttgtgtaagaaaatcattaaagaaaaacaagcttttgaaagactggaagttaagaaagaaactttactggcaatgtttaagtacaacaagttcaaatgccggatattgaatgaaaaggtgaatactccaactaccacagtctatagatgtggccctttgatagatctctgccggggtcctcatgttagacacacgggcaaaattaaggctttaaaaatacacaaaaattcctccacgtactgggaaggcaaagcagatatggagactctccagagaatttatggcatttcattcccagatcctaaaatgttgaaagagtgggagaagttccaagaggaagctaaaaaccgagatcataggaaaattggcagggaccaagaactatatttctttcatgaactcagccctggaagttgcttttttctgccaaaaggagcctacatttataatgcacttattgaattcattaggagcgaatataggaaaagaggattccaggaggtagtcaccccaaacatcttcaacagccgactctggatgacctcgggccactggcagcactacagcgagaacatgttctcctttgaggtggagaaggagctgtttgccctgaaacccatgaactgcccaggacactgccttatgtttgatcatcggccaaggtcctggcgagaactgcctctgcggctagctgattttggggtacttcataggaacgagctgtctggagcactcacaggactcacccgggtacgaagattccaacaggatgatgctcacatattctgtgccatggagcagattgaagatgaaataaaaggttgtttggattttctacgtacggtatatagcgtatttggattttcttttaaactaaacctttctactcgcccagaaaaattccttggagatatcgaagtatgggatcaagctgagaaacaacttgaaaacagtctgaatgaatttggtgaaaagtgggagttaaactctggagatggagctttctatggcccaaagattgacatacagattaaagatgcgattgggcggtaccaccagtgtgcaaccatccagctggatttccagttgcccatcagatttaatcttacttatgtaagccatgatggtgatgataagaaaaggccagtgattgttcatcgagccatcttgggatcagtggaaagaatgattgctatcctcacagaaaactatgggggcaaatggcccttttggctgtcccctcgccaggtaatggtagttccagtgggaccaacctgtgatgaatatgcccaaaaggtacgacaacaattccacgatgccaaattcatggcagacattgatctggatccaggctgtacattgaataaaaagattcgaaatgcacagttagcacagtataacttcattttagttgttggtgaaaaaaaaaaaaaaa

SEQ ID NO: 66 - DNA, 3059 bp, Homo sapiens
cagagatcacgacaagatctaaccagtcgcgcgtggtccccggcgccggagcgggccagctcagcccggcccagcccggccccgcgcagagcccccgccgcccccgcgcacagagccgggtgccccttgcggtgcgccggacgggaagccccgaggagcagctgctgcgcccgccacccgggtcgtccgtccaccgcgcgcgccgccgcccgggccgggggtccgagccgcgcgcccccggccccggccccggcccccgggcgcctgggccggatgtcccgatgagagagccggcgctggcggccagcgccatggcttaccacccgttccacgcgccacggcccgccgacttccccatgtccgcctttctggcggcggcgcagccctccttcttcccggcactcgcgctgccgcccggcgcgctggccaagccgctgcccgacccgggcctggcgggggcggcggccgcggcggcggcggcggcagcagcggccgaggcggggctgcacgtctcggcactgggcccgcacccgcccgccgcgcatctgcgctccctcaagagcctggagcccgaggacgaggtggaggacgaccccaaggtgacgctggaggccaaggagctgtgggaccagttccacaagctaggcacggagatggtcatcaccaagtccgggaggcggatgttcccccccttcaaggtgcgagtcagcggcctggacaagaaggccaagtatatcctgctgatggacattgtagccgctgacgattgccgctataagttccacaactcgcgctggatggtggcgggcaaggccgaccctgagatgcccaaacgcatgtacatccacccagacagcccagccacgggggagcagtggatggctaagcctgtggccttccacaagctgaagctgaccaacaacatctctgacaagcacggcttcaccatcctaaactccatgcacaagtaccagccgcgcttccacatagtgcgagccaacgacatcctgaagctgccttacagcaccttccgcacctacgtgttcccggagaccgacttcatcgccgtcactgcctaccagaatgacaagatcacacagctgaagatcgacaacaacccgtttgccaagggcttccgggacaccgggaacggccggcgggagaaaaggaagcagctgacgctgccgtctctacgcttgtacgaggagcactgcaaacccgagcgcgatggcgcggagtcagacgcctcgtcgtgcgaccctccccccgcgcgggaaccacccacctccccgggcgcagcgcccagtccgctgcgcctgcaccgggcccgagctgaggagaagtcgtgcgccgcggacagcgacccggagcctgagcggttgagcgaggagcgtgcgggggcgccgctaggccgcagcccggctccagacagcgccagccccactcgcttgaccgaacccgagcgcgcccgggagcggcgtagtcccgagaggggcaaggagccggccgagagcggcggggacggcccgttcggcctgaggagcctggagaaggagcgcgccgaagctcggaggaaggacgaggggcgcaaggaggcggccgagggcaaggagcagggcctggcgccgctggtggtgcagacagacagtgcgtcccccctgggcgccggacacctgcccggcctggccttttccagccacttgcacgggcagcagttctttgggccgctgggagccggccagccgctcttcctgcaccctggacagttcaccatgggccctggcgccttctccgccatgggcatgggtcacctactggcctcggtggcaggcggcggcaacggcggaggtggcgggcctgggaccgccgcggggctggacgcaggcgggctgggtcccgcggccagcgcagcaagcaccgccgcgcccttcccgttccacctctcccagcacatgctggcatctcagggaattccaatgcccactttcggaggcctcttcccctacccctacacctacatggcagcagcagccgcagccgcctcggctttgcccgccactagtgctgcagctgccgccgccgcagccgccggctccctctcccggagtcccttcctgggcagtgcccggccccgactgcgtttcagcccctatcagatcccggtcaccatcccgcctagcactagcctcctcaccaccgggctggcctctgagggctccaaggccgctggtggaaacagccgggagcctagccccctgcccgagctggctctccgcaaagtaggggccccatcccgcggtgccctgtcgcccagtggctcggccaaggaggcggccaatgaactgcagagcatccagagactggtgagtgggctggagagccagcgagccctctccccaggccgggagtcgcccaagtgaggggctgcccagctgctcccctgccacgcaggccacccgggctgcctgcccctgctgcttgggacgtgtacagcacagaatgagtatttatttaaataaaggagaaaagtgggctgcagcagccggaatagagcctcgtctggcaagtcggggcctgggacacttccctgggcctcaacaaggatcaggctgctggaaacacagtcacttgggagctgctgggctaggtccagatccgctccagcgtcaaggtggcatccgaaggtgtctctggtcttccagcgaggtgggagaggcctcatccagggcccagcggtccctgcagaagccagaaggtgcaggggccaggggtgggagcatcggagggagtcccagagccctggaccttgggcctagaccgcgtgataaaactgggttgagggatgctggaaccagttacgactgaagtcagtgtagacctgagctgggagggaacctgttagtctccccacctcttccctgaagagacaggcacccctcccagccgtggtcaacggagggagtggcacttctgccttgagtccccaggggaaaaaaaaaaaaagatatttatgaaataaatggtaatttgtgtaaataagaaaaaaaaaaaaaaaaaaa

SEQ ID NO: 67 - DNA, 1791 bp, Homo sapiens
ggaggctgcagcagcggaagaccccagtccagatccaggactgagatcccagaaccatgaacctggccatcagcatcgctctcctgctaacagtcttgcaggtctcccgagggcagaaggtgaccagcctaacggcctgcctagtggaccagagccttcgtctggactgccgccatgagaataccagcagttcacccatccagtacgagttcagcctgacccgtgagacaaagaagcacgtgctctttggcactgtgggggtgcctgagcacacataccgctcccgaaccaacttcaccagcaaatacaacatgaaggtcctctacttatccgccttcactagcaaggacgagggcacctacacgtgtgcactccaccactctggccattccccacccatctcctcccagaacgtcacagtgctcagagacaaactggtcaagtgtgagggcatcagcctgctggctcagaacacctcgtggctgctgctgctcctgctctccctctccctcctccaggccacggatttcatgtccctgtgactggtggggcccatggaggagacaggaagcctcaagttccagtgcagagatcctacttctctgagtcagctgaccccctccccgcaatccctcaaaccttgaggagaagtggggaccccacccctcatcaggagttccagtgctgcatgcgattatctacccacgtccacgcggccacctcaccctctccgcacacctctggctgtctttttgtactttttgttccagagctgcttctgtctggtttatttaggttttatccttccttttctttgagagttcgtgaagagggaagccaggattggggacctgatggagagtgagagcatgtgaggggtagtgggatggtggggtaccagccactggaggggtcatccttgcccatcgggaccagaaacctgggagagacttggatgaggagtggttgggctgtgcctgggcctagcacggacatggtctgtcctgacagcactcctcggcaggcatggctggtgcctgaagaccccagatgtgagggcaccaccaagaatttgtggcctaccttgtgagggagagaactgagcatctccagcattctcagccacaaccaaaaaaaaataaaaagggcagccctccttaccactgtggaagtccctcagaggccttggggcatgacccagtgaagatgcaggtttgaccaggaaagcagcgctagtggagggttggagaaggaggtaaggatgagggttcatcatccctccctgcctaaggaagctaaaagcatggccctgctgcccctccctgcctccacccacagtggagagggctacaaaggaggacaagaccctctcaggctgtcccaagctcccaagagcttccagagctctgacccacagcctccaagtcaggtggggtggagtcccagagctgcacagggtttggcccaagtttctaagggaggcacttcctcccctcgcccatcagtgccagcccctgctggctggtgcctgagcccctcagacagccccctgccccgcaggcctgccttctcagggacttctgcggggcctgaggcaagccatggagtgagacccaggagccggacacttctcaggaaatggcttttcccaacccccagcccccacccggtggttcttcctgttctgtgactgtgtatagtgccaccacagcttatggcatctcattgaggacaaagaaaactgcacaataaaaccaagcctctggaatctaaaaaaaaaaaaaaaaaaaa

SEQ ID NO: 68 - DNA, 1440 bp, Homo sapiens
cagtcacatttcagccactgctctgagaatttgtgagcagcccctaacaggctgttacttcactacaactgacgatatgatcatcttaatttacttatttctcttgctatgggaagacactcaaggatggggattcaaggatggaatttttcataactccatatggcttgaacgagcagccggtgtgtaccacagagaagcacggtctggcaaatacaagctcacctacgcagaagctaaggcggtgtgtgaatttgaaggcggccatctcgcaacttacaagcagctagaggcagccagaaaaattggatttcatgtctgtgctgctggatggatggctaagggcagagttggataccccattgtgaagccagggcccaactgtggatttggaaaaactggcattattgattatggaatccgtctcaataggagtgaaagatgggatgcctattgctacaacccacacgcaaaggagtgtggtggcgtctttacagatccaaagcaaatttttaaatctccaggcttcccaaatgagtacgaagataaccaaatctgctactggcacattagactcaagtatggtcagcgtattcacctgagttttttagattttgaccttgaagatgacccaggttgcttggctgattatgttgaaatatatgacagttacgatgatgtccatggctttgtgggaagatactgtggagatgagcttccagatgacatcatcagtacaggaaatgtcatgaccttgaagtttctaagtgatgcttcagtgacagctggaggtttccaaatcaaatatgttgcaatggatcctgtatccaaatccagtcaaggaaaaaatacaagtactacttctactggaaataaaaactttttagctggaagatttagccacttataaaaaaaaaaaaaaggatgatcaaaacacacagtgtttatgttggaatcttttggaactcctttgatctcactgttattattaacatttatttattatttttctaaatgtgaaagcaatacataatttagggaaaattggaaaatataggaaactttaaacgagaaaatgaaacctctcataatcccactgcatagaaataacaagcgttaacattttcatatttttttctttcagtcatttttctatttgtggtatatgtatatatgtacctatatgtatttgcatttgaaattttggaatcctgctctatgtacagttttgtattatactttttaaatcttgaactttataaacattttctgaaatcattgattattctacaaaaacatgattttaaacagctgtaaaatattctatgatatgaatgttttatgcattatttaagcctgtctctattgttggaatttcaggtcattttcataaatattgttgcaataaatatccttgaacacaaaaaaaaaaaaaaaaaa

SEQ ID NO: 69 - DNA, 2806 bp, Homo sapiens
gccaccttgtctgtgagctccctgtgccccccatacggtgtgtcctgtgggttggggtgtgcggaagaaagggacagagactgaggatgtgcggtgtaagcagtgtgctcggggtaccttctcagatgtgccttctagtgtgatgaaatgcaaagcatacacagactgtctgagtcagaacctggtggtgatcaagccggggaccaaggagacagacaacgtctgtggcacactcccgtccttctccagctccacctcaccttcccctggcacagccatctttccacgccctgagcacatggaaacccatgaagtcccttcctccacttatgttcccaaaggcatgaactcaacagaatccaactcttctgcctctgttagaccaaaggtactgagtagcatccaggaagggacagtccctgacaacacaagctcagcaagggggaaggaagacgtgaacaagaccctcccaaaccttcaggtagtcaaccaccagcaaggcccccaccacagacacatcctgaagctgctgccgtccatggaggccactgggggcgagaagtccagcacgcccatcaagggccccaagaggggacatcctagacagaacctacacaagcattttgacatcaatgagcatttgccctggatgattgtgcttttcctgctgctggtgcttgtggtgattgtggtgtgcagtatccggaaaagctcgaggactctgaaaaaggggccccggcaggatcccagtgccattgtggaaaaggcagggctgaagaaatccatgactccaacccagaaccgggagaaatggatctactactgcaatggccatggtatcgatatcctgaagcttgtagcagcccaagtgggaagccagtggaaagatatctatcagtttctttgcaatgccagtgagagggaggttgctgctttctccaatgggtacacagccgaccacgagcgggcctacgcagctctgcagcactggaccatccggggccccgaggccagcctcgcccagctaattagcgccctgcgccagcaccggagaaacgatgttgtggagaagattcgtgggctgatggaagacaccacccagctggaaactgacaaactagctctcccgatgagccccagcccgcttagcccgagccccatccccagccccaacgcgaaacttgagaattccgctctcctgacggtggagccttccccacaggacaagaacaagggcttcttcgtggatgagtcggagccccttctccgctgtgactctacatccagcggctcctccgcgctgagcaggaacggttcctttattaccaaagaaaagaaggacacagtgttgcggcaggtacgcctggacccctgtgacttgcagcctatctttgatgacatgctccactttctaaatcctgaggagctgcgggtgattgaagagattccccaggctgaggacaaactagaccggctattcgaaattattggagtcaagagccaggaagccagccagaccctcctggactctgtttatagccatcttcctgacctgctgtagaacatagggatactgcattctggaaattactcaatttagtggcagggtggttttttaattttcttctgtttctgatttttgttgtttggggtgtgtgtgtgtgtttgtgtgtgtgtgtgtgtgtgtgtgtgtgtgtgtttaacagagaatatggccagtgcttgagttctttctccttctctctctctcttttttttttaaataactcttctgggaagttggtttataagcctttgccaggtgtaactgttgtgaaatacccaccactaaagttttttaagttccatattttctccattttgccttcttatgtattttcaagattattctgtgcactttaaatttacttaacttaccataaatgcagtgtgacttttcccacacactggattgtgaggctcttaacttcttaaaagtataatggcatcttgtgaatcctataagcagtctttatgtctcttaacattcacacctactttttaaaaacaaatattattactatttttattattgtttgtcctttataaattttcttaaagattaagaaaatttaagaccccattgagttactgtaatgcaattcaactttgagttatcttttaaatatgtcttgtatagttcatattcatggctgaaacttgaccacactattgctgattgtatggttttcacctggacaccgtgtagaatgcttgattacttgtactcttcttatgctaatatgctctgggctggagaaatgaaatcctcaagccatcaggatttgctatttaagtggcttgacaactgggccaccaaagaacttgaacttcaccttttaggatttgagctgttctggaacacattgctgcactttggaaagtcaaaatcaagtgccagtggcgccctttccatagagaatttgcccagctttgctttaaaagatgtcttgttttttatatacacataatcaataggtccaatctgctctcaaggccttggtcctggtgggattccttcaccaattactttaattaaaaatggctgcaactgtaagaacccttgtctgatatatttgcaactatgctcccatttacaaatgtaccttctaatgctcagttgccaggttccaatgcaaaggtggcgtggactccctttgtgtgggtggggtttgtgggtagtggtgaaggaccgatatcagaaaaatgccttcaagtgtactaatttattaataaacattaggtgtttgttaaaaaaaaaaaaaaa

SEQ ID NO: 70 - DNA, 1399 bp, Homo sapiens
tgagattcacctcgcaagtggttccctcattcgagtgctccggcgcacagacccgcgccccgccgtccgcgagcctcccgagagccgtcccttcgtccggccctggagcattgcgtttgtcgccggtgtcgcagtgcgaggatggcgccgcgggtgtagcggctctctgcgcaggccgagtgggcccagagaagcgaggaactccgcagctcgtcgacacgtctcgtctcctgtcccaattcagggcttggtgaggtgactcgcggtcgcgggtgactcgccggcaggacactgcctggaacgcctggagcgcctcccactgcagacgtctgtccgtctccagccgctctcctctgacgggtcctgcctcagttggcggaatggcggccacgggagccaatgcagagaaagctgaaagtcacaatgattgccccgtcagacttttaaatccaaacatagcaaaaatgaaagaagatattctctatcatttcaatctcaccactagcagacacaatttcccagccttgtttggagatgtgaagtttgtgtgtgttggtggaagcccctcccggatgaaagccttcatcaggtgcgttggtgcagagctgggccttgactgcccaggtagagactatcccaacatctgtgcgggaactgaccgctatgccatgtataaagtaggaccggtgctgtctgtcagtcatggtatgggcattccttctatctcaatcatgttgcatgagctcataaagctgctgtactatgcccggtgctccaacgtcactatcatccgcattggcacttctggtgggataggtctggagcccggcactgtggtcataacagagcaggcagtggatacctgcttcaaggcagagtttgagcagattgtcctggggaagcgggtcatccggaaaacggaccttaacaagaagctggtgcaggagctgttgctgtgttctgcagagctgagcgagttcaccacagtggtggggaacaccatgtgcaccttggacttctatgaagggcaaggccgtctggatggggctctctgctcctacacggagaaggacaagcaggcgtatctggaggcagcctatgcagccggcgtccgcaatatcgagatggagtcctcggtgtttgccgccatgtgcagcgcctgcggcctccaagcggccgtggtgtgtgtcaccctcctgaaccgcctggaaggggaccagatcagcagccctcgcaatgtgctcagcgagtaccagcagaggccgcagcggctggtgagctacttcatcaagaagaaactgagcaaggcctgagcgctgccctgcacctccgcagacctgctgtgatgacttgccattaaaagcattgtccaaaaaaaaaaaaaaaaaaaaaaaaaaaa

SEQ ID NO: 71 - DNA, 24 bp, Artificial
  chemically synthesized
tggaagaggcacgttcttttcttt

SEQ ID NO: 72 - DNA, 23 bp, Artificial
  chemically synthesized
caggtgcagctggtgcagtctgg

SEQ ID NO: 73 - DNA, 23 bp, Artificial
  chemically synthesized
caggtcaacttaagggagtctgg

SEQ ID NO: 74 - DNA, 23 bp, Artificial
  chemically synthesized
gaggtgcagctggtggagtctgg

SEQ ID NO: 75 - DNA, 23 bp, Artificial
  chemically synthesized
caggtgcagctgcaggagtcggg

SEQ ID NO: 76 - DNA, 23 bp, Artificial
  chemically sythesized
caggtacagctgcagcagtcagg

SEQ ID NO: 77 - DNA, 51 bp, Artificial
  chemically synthesized
gtcctcgcaactgcggcccagccggccatggcccaggtcaacttaagggag

SEQ ID NO: 78 - DNA, 51 bp, Artificial
  chemically synthesized
gtcctcgcaactgcggcccagccggccatggccgaggtgcagctggtggag

SEQ ID NO: 79 - DNA, 51 bp, Artificial
  chemically synthesized
gtcctcgcaactgcggcccagccggccatggcccaggtgcagctgcaggag

SEQ ID NO: 80 - DNA, 51 bp, Artificial
  chemically synthesized
gtcctcgcaactgcggcccagccggccatggcccaggtgcagctgttgcag

SEQ ID NO: 81 - DNA, 51 bp, Artificial
  chemically synthesized
gtcctcgcaactgcggcccagccggccatggcccaggtacagctgcagcag

SEQ ID NO: 82 - DNA, 48 bp, Artificial
  chemically synthesized
gagtcattctcgacttgcggccgctggaagaggcacgttcttttcttt

SEQ ID NO: 83 - DNA, 23 bp, Artificial
  chemically synthesized
gatctgatctggggcctcggtgc

SEQ ID NO: 84 - DNA, 27 bp, Artificial
  chemically synthesized
gcaagcccaataggaacccatgtaccg

SEQ ID NO: 85 - DNA, 2056 bp, Homo sapiens
agtttcataatttccgtgggtcgggccgggcgggccaggcgctgggcacggtgatggccaccactggggccctgggcaactactacgtggactcgttcctgctgggcgccgacgccgcggatgagctgagcgttggccgctatgcgccggggaccctgggccagcctccccggcaggcggcgacgctggccgagcaccccgacttcagcccgtgcagcttccagtccaaggcgacggtgtttggcgcctcgtggaacccagtgcacgcggcgggcgccaacgctgtacccgctgcggtgtaccaccaccatcaccaccacccctacgtgcacccccaggcgcccgtggcggcggcggcgccggacggcaggtacatgcgctcctggctggagcccacgcccggtgcgctctccttcgcgggcttgccctccagccggccttatggcattaaacctgaaccgctgtcggccagaaggggtgactgtcccacgcttgacactcacactttgtccctgactgactatgcttgtggttctcctccagttgatagagaaaaacaacccagcgaaggcgccttctctgaaaacaatgctgagaatgagagcggcggagacaagccccccatcgatcccaataacccagcagccaactggcttcatgcgcgctccactcggaaaaagcggtgcccctatacaaaacaccagaccctggaactggagaaagagtttctgttcaacatgtacctcaccagggaccgcaggtacgaggtggctcgactgctcaacctcaccgagaggcaggtcaagatctggttccagaaccgcaggatgaaaatgaagaaaatcaacaaagaccgagcaaaagacgagtgatgccatttgggcttatttagaaaaaagggtaagctagagagaaaaagaaagaactgtccgtcccccttccgccttctcccttttctcacccccaccctagcctccaccatccccgcacaaagcggctctaaacctcaggccacatcttttccaaggcaaaccctgttcaggctggctcgtaggcctgccgctttgatggaggaggtattgtaagctttccattttctataagaaaaaggaaaagttgaggggggggcattagtgctgatagctgtgtgtgttagcttgtatatatatttttaaaaatctacctgttcctgacttaaaacaaaaggaaagaaactacctttttataatgcacaactgttgatggtaggctgtatagtttttagtctgtgtagttaatttaatttgcagtttgtgcggcagattgctctgccaagatacttgaacactgtgttttattgtggtaattatgttttgtgattcaaacttctgtgtactgggtgatgcacccattgtgattgtggaagatagaattcaatttgaactcaggttgtttatgaggggaaaaaaacagttgcatagagtatagctctgtagtggaatatgtcttctgtataactaggctgttaacctatgattgtaaagtagctgtaagaatttcccagtgaaataaaaaaaaattttaagtgttctcggggatgcatagattcatcattttctccaccttaaaaatgcgggcatttaagtctgtccattatctatatagtcctgtcttgtctattgtatatataatctatatgattaaagaaaatatgcataatcagacaagcttgaatattgtttttgcaccagacgaacagtgaggaaattcggagctatacatatgtgcagaaggttactacctagggtttatgcttaattttaatcggaggaaatgaatgctgattgtaacggagttaattttattgataataaattatacactatgaaaccgccattgggctactgtagatttgtatccttgatgaatctggggtttccatcagactgaacttacactgtatattttgcaatagttacctcaaggcctactgaccaaattgttgtgttgagatgatatttaactttttgccaaataaaatatattgattcttttctaaaaaaaaaaaaaaaaaaaa

SEQ ID NO: 86 - DNA, 625 bp, Homo sapiens
agagtcactcctgccttcaccatgaagtccagcggcctcttccccttcctggtgctgcttgccctgggaactctggcaccttgggctgtggaaggctctggaaagtccttcaaagctggagtctgtcctcctaagaaatctgcccagtgccttagatacaagaaacctgagtgccagagtgactggcagtgtccagggaagaagagatgttgtcctgacacttgtggcatcaaatgcctggatcctgttgacaccccaaacccaacaaggaggaagcctgggaagtgcccagtgacttatggccaatgtttgatgcttaacccccccaatttctgtgagatggatggccagtgcaagcgtgacttgaagtgttgcatgggcatgtgtgggaaatcctgcgtttcccctgtgaaagcttgattcctgccatatggaggaggctctggagtcctgctctgtgtggtccaggtcctttccaccctgagacttggctccaccactgatatcctcctttggggaaaggcttggcacacagcaggctttcaagaagtgccagttgatcaatgaataaataaacgagcctatttctctttgcaaaaaaaaaaaaaaaaaaaaaaaaaaaaaa

SEQ ID NO: 87 - DNA, 1211 bp, Homo sapiens
caaccttctcagctacaaatacttgaagaaacagagcagggagctcaagccagtgggagtcatggcccctgcctcagggcctgccagcacggacgctgtgtctgctctgttggaacagacagcagtggagctggagaagaggcaggagggcaggagcagcacacagacactggaagacagctggaggtatgaggagaccagtgagaatgaggcagtagccgaggaagaggaggaggaggtggaggaggaggagggagaagaggatgttttcaccgagaaagcctcacctgatatggatgggtacccagcattaaaggtggacaaagagaccaacacggagaccccggccccatcccccacagtggtgcgacctaaggaccggagagtgggcaccccgtcccaggggccatttcttcgagggagcaccatcatccgctctaagaccttctccccaggaccccagagccagtacgtgtgccggctgaatcggagtgatagtgacagctccactctgtccaaaaagccaccttttgttcgaaactccctggagcgacgcagcgtccggatgaagcggccttcctcggtcaagtcgctgcgctccgagcgtctgatccgtacctcgctggacctggagttagacctgcaggcgacaagaacctggcacagccaattgacccaggagatctcggtgctgaaggagctcaaggagcagctggaacaagccaagagccacggggagaaggagctgccacagtggttgcgtgaggacgagcgtttccgcctgctgctgaggatgctggagaagcggcagatggaccgagcggagcacaagggtgagcttcagacagacaagatgatgagggcagctgccaaggatgtgcacaggctccgaggccagagctgtaaggaacccccagaagttcagtctttcagggagaagatggcatttttcacccggcctcggatgaatatcccagctctctctgcagatgacgtctaatcgccagaaaagtatttcctttgttccactgaccaggctgtgaacattgactgtggctaaagttatttatgtggtgttatatgaaggtactgagtcacaagtcctctagtgctcttgttggtttgaagatgaaccgactttttagtttgggtcctactgttgttattaaaaaaaaaaaaaaaacaaaaaaaaaaaaaaaaaaaaaaaaaaa

SEQ ID NO: 88 - protein, 18 aa, Homo sapiens
CPGAKALSRVREDIVEDE

SEQ ID NO: 89 - DNA, 1108 bp, Homo sapiens
gagtgagtgagagggcagaggaaatactcaatctgtgccactcactgccttgagcctgcttcctcactccaggactgccagaggctcactcccttgagcctgcttcctcactccaggactgccagaggaagcaatcaccaaaatgaagactgctttaattttgctcagcattttgggaatggcctgtgctttctcaatgaaaaatttgcatcgaagagtcaaaatagaggattctgaagaaaatggggtctttaagtacaggccacgatattatctttacaagcatgcctacttttatcctcatttaaaacgatttccagttcagggcagtagtgactcatccgaagaaaatggagatgacagttcagaagaggaggaggaagaagaggagacttcaaatgaaggagaaaacaatgaagaatcgaatgaagatgaagactctgaggctgagaataccacactttctgctacaacactgggctatggagaggacgccacgcctggcacagggtatacagggttagctgcaatccagcttcccaagaaggctggggatataacaaacaaagctacaaaagagaaggaaagtgatgaagaagaagaggaggaagaggaaggaaatgaaaacgaagaaagcgaagcagaagtggatgaaaacgaacaaggcataaacggcaccagtaccaacagcacagaggcagaaaacggcaacggcagcagcggaggagacaatggagaagaaggggaagaagaaagtgtcactggagccaatgcagaaggcaccacagagaccggagggcagggcaagggcacctcgaagacaacaacctctccaaatggtgggtttgaacctacaaccccaccacaagtctatagaaccacttccccaccttttgggaaaaccaccaccgttgaatacgagggggagtacgaatacacgggcgtcaatgaatacgacaatggatatgaaatctatgaaagtgagaacggggaacctcgtggggacaattaccgagcctatgaagatgagtacagctactttaaaggacaaggctacgatggctatgatggtcagaattactaccaccaccagtgaagctccagcctg

SEQ ID NO: 90 - DNA, 6894 bp, Homo sapiens
tgacccggtccgtgtgggccagcgggaaggaagccagttgagggaagttctccatgaatgtacgtcacaatgatgatgaccgaccaaatccctctggaactgccaccattgctgaacggagaggtagccatgatgccccacttggtgaatggagatgcagctcagcaggttattctcgttcaagttaatccaggtgagactttcacaataagagcagaggatggaacacttcagtgcattcaaggacctgctgaagttcccatgatgtcacccaatggatccattcctcccattcatgtgcctccaggttatatctcacaggtgattgaagatagtactggagtccgccgggtggtggtcacaccccagtctcctgagtgttatcccccaagctacccctcagccatgtctccaacccatcatctccctccctatctgactcaccatccacattttattcataactcacacacggcttactacccacctgttaccggacctggagatatgccgcctcagttttttccccagcatcatcttccccacacaatatatggtgagcaagaaattataccattttatggaatgtcaagctacatcacccgagaagaccagtacagcaagcctccgcacaaaaaactgaaagaccgccagatcgatcgccagaaccgactcaacagacctccttctgctatctacaaaagcagctgcacaacagtatacaatggctatgggaagggccatagtggtggaagtggcggaggcggcagcggtagtggtcccggaattaagaaaacagagcgacgagcaagaagcagcccaaagtcgaatgattcagacttgcaagaatatgagttggaagtaaagagggtgcaagacattctttcgggaatagagaaaccacaggtttctaatattcaggcaagagcagttgtgttgtcctgggctccccctgttggactttcctgtggaccccacagtggtctttccttcccctacagttacgaggtggccttatcagacaaaggacgagatggaaaatacaagataatttacagtggagaagaattagaatgtaacctgaaagatcttagaccagcaacagattatcatgtgagggtgtatgccatgtacaattccgtaaagggatcctgctccgagcctgttagcttcaccacccacagctgtgcacccgagtgtcctttcccccctaagctggcacataggagcaaaagttcactaaccctgcagtggaaggcaccaattgacaacggttcaaaaatcaccaactaccttttagagtgggatgagggaaaaagaaatagtggtttcagacagtgcttcttcgggagccagaagcactgcaagttgacaaagctttgtccggcaatggggtacacattcaggctggccgctcgaaacgacattggtaccagtggttatagccaagaggtggtgtgctacacattaggaaatatccctcagatgccttctgcaccaaggctggttcgagctggcatcacatgggtcacgttgcagtggagtaagccagaaggctgttcacccgaggaagtgatcacctacaccttggaaattcaggaggatgaaaatgataaccttttccacccaaaatacactggagaggatttaacctgtactgtgaaaaatctcaaaagaagcacacagtatacattcaggctgactgcttctaatacggaaggaaaaagctgtccaagcgaagttcttgtttgtacgacgagtcctgacaggcctggacctcctaccagaccgcttgtcaaaggcccagttacatctcatggctttagtgtcaaatgggatccccctaaggacaatggtggttcagaaatcctcaagtacttgctagagattactgatggaaattctgaagcgaatcagtgggaagtggcctacagtgggtcggctaccgaatacaccttcacccacttgaaaccaggcactttgtacaaactccgagcatgctgcatcagtaccggcggacacagccagtgttctgaaagtctccctgttcgcacactaagcattgcaccaggtcaatgtcgaccaccgagggttttgggtagaccaaagcacaaagaagtccacttagagtgggatgttcctgcatcggaaagtggctgtgaggtctcagagtacagcgtggagatgacggagcccgaagacgtagcctcggaagtgtaccatggcccagagctggagtgcaccgtcggcaacctgcttcctggaaccgtgtatcgcttccgggtgagggctctgaatgatggagggtatggtccctattctgatgtctcagaaattaccactgctgcagggcctcctggacaatgcaaagcaccttgtatttcttgtacacctgatggatgtgtcttagtgggttgggagagtcctgatagttctggtgctgacatctcagagtacaggttggaatggggagaagatgaagaatccttagaactcatttatcatgggacagacacccgttttgaaataagagacctgttgcctgctgcacagtattgctgtagactacaggccttcaatcaagcaggggcagggccgtacagtgaacttgtcctttgccagacgccagcgtctgcccctgaccccgtctccactctctgtgtcctggaggaggagccccttgatgcctaccctgattcaccttctgcgtgccttgtactgaactgggaagagccgtgcaataacggatctgaaatccttgcttacaccattgatctaggagacactagcattaccgtgggcaacaccaccatgcatgttatgaaagatctccttccagaaaccacctaccggatcagaattcaggctataaatgaaattggagctggaccatttagtcagttcattaaagcaaaaactcggccattaccacccttgcctcctaggctagaatgtgctgctgctggtcctcagagcctgaagctaaaatggggagacagtaactccaagacacatgctgctgaggacattgtgtacacactacagctggaggacagaaacaagaggtttatttcaatctacagaggacccagccacacctacaaggtccagagactgacggaattcacatgctactccttcagaatccaggcagcaagcgaggctggagaagggcccttctcagaaacctataccttcagcacaaccaaaagtgtcccccccaccatcaaagcacctcgagtaacacagttagaaggaaattcatgtgaaattttatgggagacggtaccatcaatgaaaggtgaccctgttaactacattctgcaggtattggttggaagagaatctgagtacaaacaggtgtacaagggagaagaagccacattccaaatctcaggcctccagaccaacacagactacaggttccgcgtatgtgcgtgtcgtcgctgtttagacacctctcaggagctaagcggagccttcagcccctctgcggcttttgtattacaacgaagtgaggtcatgcttacaggggacatggggagcttagatgatcccaaaatgaagagcatgatgcctactgatgaacagtttgcagccatcattgtgcttggctttgcaactttgtccattttatttgcctttatattacagtacttcttaatgaagtaaacccaacaaaactagaggtatgaattaatgctacacattttaatacacacatttattcagatactcccctttttaaagcccttttgttttttgatttatatactctgttttacagatttagctagaaaaaaaatgtcagtgttttggtgcacctttttgaaatgcaaaactaggaaaaggttaaactggatttttttttttaaaaaaaagaaaaaaaaagaagaaaagtataccagataccaaaagctagctttcttatgttttcctttaaattttcagatttaccttcattctgttttcactgatgtcttttgcaagcctttgatttttttttttttgttacagtttagtaatttatattcaccagtcacttcatatgtcttgaacatctgtatctgtaaacatgaatcaccgtgtgtgtacttacagggctaggatttcagtgttgtcagagtattaccacacagcaacagcaacatacagaagatatgttcactcagataagactgccctaaacaaccattttgtcactcagttatttaactgtgtttagctcatttaaatcaaaatgtgtactttaatctaaaatgttttaataatctgtatttcttataattttaacactatgagctgcctgtataagaaatcaagtaaccagaatgcacctataaattatggagcattgtagattttaccacatcaattcatagcagtaactttaagagggcattgtgcaatagttagttgttttcttgttcagctattttaaaggctgctttaacttgtttgtttgtctttgtatataactacttctaatctaatcactagagttattatattctgttatgtttgaccagaattatatgacaagaactggtgacagtttagtgcctctgcccattgtccatgatttacactaattgtgagcagtcttcttatgtgtcagctcattatttttgaaacatttgcctttaggctgttctttgaggtatcaatgaagtgattgaatttcaataccttaattcagtgcacataatactaatgtaacagcagatgaaaattgataaaacccaaaagagagtcatctaaatttgtagttcctatttctgtgggtttgcctggccatggttggagagggaatggtgtttgatggtaaacacagggtgtttggggatcaaggagcctagattctctccctggatctgtcactaacttgctgcgtgacctgaacacgtcactttacctctctgtgcctcagttttcccatgcatgaaaaataaaataaaataaaacggggattctaatgtttgtaagtgctttgagatctttgaccaacaggtgctattggagtgcaaagtgttactcttacgtgtttattttgagtcatgagataatcaattttaacccaaagtcattggattatttatatgaagtccataatgttcgagtacctcagggacatttaagagttggaggtgcaaatatattccaaaagggtgcaacagacacagtgtatccccctgcttctgtttttgtatatttttgctacttggtttttcttgatcatagctattttgtgcttgatctttattgtctaagatgcagtatcctgtactagcttataatattcccataccaaagtcatggggaaacaaacattattttgtttttggtttatttatactatattctgcatacagtactttaaatgccaattacagtgcaatctttatttattgtaaaattttttaagtgtacttatgtactaattttcccttgtagcatgttatatttttgtgttttatacttttgtaattttaggtcagtcttgttccttggcaacatctgtagtattattaatcttctgacattttcttatgtttttaaaaagataagagcatctagtgcattaaatgccaaaaaaaaaatacattatcagtgattgaaacgtttacatgtacccaaaaaccataatcatctcttggaagaaaatgctgagatcaatgaattattctgtgtgcctatattgacgtagtgagtactagagagttctgtattttattattgactataataattagtttaattagctttgcaaactgatggcatcaaggtaaatatatttttgccaaagttctggccttccaaaactcacccccttatttaaatgtgtgctatgacccactatgaccacagcatctgcattttctaaaaaattccatgcaggtgttttggggagaggtattttttaagcaatgaaaattcaactgagtacaaagccccctcttggggggttggggaagtctcttttttgaaacacttcagaactgctgctataaagaaattctctaattggttgaattttttttttaagtaaatagtactttaggccaaaatttatatgaatatttgatcttcttgagattttcatactatcatttaaccaccaggaagctgaagtgtgtgaagtacaaagctgacagcactttattttattgctctccattatttggtattcattatattccttcagtcagaaaattattactctctatggcactgttttttatcacaaatatgtatatgtgatattgatatataactatatatattgccatcacacacgaacaataaaataaagtgttctattaacctgatctctttgcccttttgctatgtgaggagtgaatgagtggccttctgatgctctgactcttctctgtatgtcaaactcatccctggcacaagaaattccagtcatgtgaagcaaactgccctttgtcctcaaagaaattgttgaaaaagaaaactttttaaagagattttttgcatattctctgccttgttcttatcaacttgaaatgttggcattttctaaccttgttttgttggctacaataattcagtattcatgtcaaaattgagaagtgccctaattgaatgtgtttgaatgttatccttgcacaattctttaaattgaaagataaaatgttttacctcactgttggacatacattccaagcttttcaactctaggagaaaaagaaaatcatgttttcctgtattgtaaattttagactatttcatatacattgtattaaaactgccatatcaattttaatgtatagattttgcaaatattatgctatatgtaatacctaactgtatctgtagtgtatatgtaatatatttatgcccaataaatgttttaattctttctga

SEQ ID NO: 91 - DNA, 2365 bp, Homo sapiens
gagttgccgagcgcgccccgtccctcgcgcgcgatgctcccctggacggcgctcggcctggccctgagcttgcggctggcgctggcgcggagcggcgcggagcgcggtccaccagcatcagccccccgaggggacctgatgttcctgctggacagctcagccagcgtctctcactacgagttctcccgggttcgggagtttgtggggcagctggtggctccactgcccctgggcaccggggccctgcgtgccagtctggtgcacgtgggcagtcggccatacaccgagttccccttcggccagcacagctcgggtgaggctgcccaggatgcggtgcgtgcttctgcccagcgcatgggtgacacccacactggcctggcgctggtctatgccaaggaacagctgtttgctgaagcatcaggtgcccggccaggggtgcccaaagtgctggtgtgggtgacagatggcggctccagcgaccctgtgggcccccccatgcaggagctcaaggacctgggcgtcaccgtgttcattgtcagcaccggccgaggcaacttcctggagctgtcagccgctgcctcagcccctgccgagaagcacctgcactttgtggacgtggatgacctgcacatcattgtccaagagctgaggggctccattctcgacgcgatgcggccgcagcagctccatgccacggagatcacgtccagcggcttccgcctggcctggccacccctgctgaccgcagactcgggctactatgtgctggagctggtgcccagcgcccagccgggggctgcaagacgccagcagctgccagggaacgccacggactggatctgggccggcctcgacccggacacggactacgacgtggcgctagtgcctgagtccaacgtgcgcctcctgaggccccagatcctgcgggtgcgcacgcggcccggtgaggcagggccgggggcttcgggcccggagtcgggggctgggccggcccccacgcagctcgccgccctccccgccccagaggaggccgggccagagcgcatcgtcatctcccacgcccggccgcgcagcctccgcgtgagttgggccccagcgctgggctcagccgcggcgctcggctaccacgtgcagttcgggccgctgcggggcggggaggcgcagcgggtggaggtgcccgcgggccgcaactgcaccacgctgcagggcctggcgccgggcaccgcctacctggtgaccgtgaccgccgccttccgctcgggccgcgagagcgcgctgtccgccaaggcctgcacgcccgacggcccgcgcccgcgcccacgccccgtgccccgcgccccgaccccggggaccgccagccgtgagccgtaagccggcgtccccgcccagccgagagggccggcgcctacctgagggcccctgtgtcccgaacccggagcggaggcgcccaacccggcagacgggtgcaggcccggcctttccccacgcggactccgcgcgaccccggccctctccctgcggccgcagggcttccccgcctggcgcctgccctccagggctggggcctcgcctggcgggaccccgcagcagccccggccccatccccgcccagagccgggcgtcgtgtgggtccgtgggtgataattgagagcgtcagacccaggactgttcagggaggagccccggtcagactcccacgtgtgaagaccgggtcccaagtggcaagggctggcctggggcgggcagcttgggtcctggacgttgataggaagcggaaggggaatcgcgggaagctggcccaggtcaggtccgcaaaggcttctgaagaagaggaagggcgagtaggggcacctggacgctgatggtggccaggatgctcagctggccaggagggcagcacctgctggggacggtggccctgccttcatgcccaggacaccagctgggtccagctagcagccactgggaatcagaggaatggggcagagctgggcattcaggaccttgaggacacgtgaccccacccgcccaccgccactatcaggccccgggaccgcactgacaggaaaccttccgtcgtgagggagcacttcccaggggccgcagggacgacactctccagggaggccccagcaaccacaccatcttcttgctgtgagaggtctcaccccgggctacctcctgtcactactcactgccctggggtccgtgggcaagttgcccagggtgggggtgcctagccaggtgcagtccccgccccgcctagtcctcggcgtcacgcaatgctcacctcgcctcttccccactaacatcccagactttaaaattcagtaaatcagatgtacaccgaaaaaaaaaaaaaaaa

SEQ ID NO: 92 - DNA, 2892 bp, Homo sapiens
gcggagcagcgcagggagccaggcgggctgccggcgggtgtgaagaaaaaaatgacactccaatgggctgcagtggcaacctttctttatgccgaaataggactcattttaatcttctgcctaccttttattcctcctcagagatggcagaagattttttcatttaatgtctggggtaaaattgcaactttttggaacaaggctttccttaccattatcatcctattgattgttctatttctagatgctgtgagagaagtaaggaaatattcctcagttcataccattgagaagagctccaccagcagacctgatgcctatgaacacacacagatgaaactttttaggtctcaaagaaatctttacatttctggattttccctatttttttggctagttttgagacgtctggttacgcttattactcaactggcaaaagaactgtcaaacaaaggtgtacttaaaactcaagcagaaaatactaacaaggctgccaaaaaatttatggaagaaaacgaaaaactaaaaaggattttgaaaagccatggtaaagatgaagaatgtgttttggaagcagaaaataaaaaactagtagaagaccaggagaaactgaaaactgaattaaggaagacttcagatgccctttctaaggcacaaaatgatgtgatggaaatgaagatgcagtcagagagactttcgaaagaatatgatcaactcctgaaagaacactctgaacttcaggatcgtttagaaagaggcaacaagaaaagactgtgaactttataaaagacacttgcaatatactgtgtcaaaatgataattttgttatgttagcctctagaaaatttaagttcagaaaaatgcactatgaccggttcgtaatttttttaatgccacacataggttgtattgtaatggcattatcaaaatatttgatgatgtttcagatatattgcaaagtctgtattccagctcttaagaaaaatataagcatgttaaataccatatttacatattgataatgtcattggtatatggtggctgtttaccaataaaaggaaaaaattcattaaccggttgcttccaaaattagaagttttaagttgcatgaaaccattaatagccttgaaagctttgataagttttcagtaataataacctatttaatcagatgatgatgtgtttgaaaatagtgttcaatatcagcaaatttgtacacagggaatgtaaataaggataactgatcagagttatccactgtatttataaggaagagtcggaaaaaacaatgaccttagttttttttaagcctgatgatactatggtttactctaataagatagctatattgataattatatttttgttactgtgcccttgcacattttggtctttttgttaatatttttattaataacacataattagtaaccactctactgtttcaagttaatctagtaatagagcttacatatatttgtataactgctataccactgaactgaatttattttacaacagtgtagaattcttgaaaagttaacgtagaaaatatccaaaaagcagtatttctagaaagtgtccaaaaagcagtatttctttcccttggttgtgagagtaactaattatataaatattacctcaaaaatacatacactggtatcacacagtctttctacaatgtttctgtattctgaaagctaaatattaagtactatttttccattcaaatattcatttagaatttcctttagaagatggcagtgattataatattaatatgatttcatttgttccagtgtttagacatgaaatcatcttccttgtctcatgaaaacctaaatataaaaaaaaggaaaatactggagtttttatttctcttgtctttgttacatcctctgtttattataattttagcaccaacttcacacctagctaatttttttcatcataaagtggatgaaatgagcaagtacctaaaaattttatttcagataaaagtcaggagttactgctaaaaaacagacatgtaggagacattcaacaggagtatgaaatgagagttagaccatatgggctgacaacaccataaataacaagaaaagggagtgctgaaataggagagaacagagcaaatgttagctcaaagtatagacttagaaatatcaaagtaagagctatctggataaatatatagatattgagtgcttggaatcctagcctactatgtgaaaattaagtctaatgtcagaataacttacagaaaaatagaaaatgcacagctttaaaatgggcagagttaaaatctattcccagctttatcacttatttagccatgctagcctaggcctctatttccttgtctccaaaatgagaataataaaatttaggtcaggattactatataaactaagataatacagtgattctcaaagttgttcagactgtatagtaaggagaaagtctggttgcactttgaagagcttgaagatttgaaagattcccaaaaaagcattttaaagtttacatttaagggaccttggacctcaaccctctcaagtttacaagtctgaaactttagacatcaaaagtttgagcagtttttccaaggcaacattgatagttagattcagggccaggctgtaagtctagaatttagatatcctgatcccccagataccgctcttctggttatacacagaccagctataatttgctaaacataaaatattgcagtgtattagccggctgtggctccagagtctgtgccctttaccaccgtgcccaactgtttcacatgctgtgtttggtagtttttcctagtactctccttaataatggtggtgtttagcaaattgtattacataaataaatatttatttcatggattga

SEQ ID NO: 93 - DNA, 4828 bp, Homo sapiens
agtggcgtcggaactgcaaagcacctgtgagcttgcggaagtcagttcagactccagcccgctccagcccggcccgacccgaccgcacccggcgcctgccctcgctcggcgtccccggccagccatgggcccttggagccgcagcctctcggcgctgctgctgctgctgcaggtctcctcttggctctgccaggagccggagccctgccaccctggctttgacgccgagagctacacgttcacggtgccccggcgccacctggagagaggccgcgtcctgggcagagtgaattttgaagattgcaccggtcgacaaaggacagcctatttttccctcgacacccgattcaaagtgggcacagatggtgtgattacagtcaaaaggcctctacggtttcataacccacagatccatttcttggtctacgcctgggactccacctacagaaagttttccaccaaagtcacgctgaatacagtggggcaccaccaccgccccccgccccatcaggcctccgtttctggaatccaagcagaattgctcacatttcccaactcctctcctggcctcagaagacagaagagagactgggttattcctcccatcagctgcccagaaaatgaaaaaggcccatttcctaaaaacctggttcagatcaaatccaacaaagacaaagaaggcaaggttttctacagcatcactggccaaggagctgacacaccccctgttggtgtctttattattgaaagagaaacaggatggctgaaggtgacagagcctctggatagagaacgcattgccacatacactctcttctctcacgctgtgtcatccaacgggaatgcagttgaggatccaatggagattttgatcacggtaaccgatcagaatgacaacaagcccgaattcacccaggaggtctttaaggggtctgtcatggaaggtgctcttccaggaacctctgtgatggaggtcacagccacagacgcggacgatgatgtgaacacctacaatgccgccatcgcttacaccatcctcagccaagatcctgagctccctgacaaaaatatgttcaccattaacaggaacacaggagtcatcagtgtggtcaccactgggctggaccgagagagtttccctacgtataccctggtggttcaagctgctgaccttcaaggtgaggggttaagcacaacagcaacagctgtgatcacagtcactgacaccaacgataatcctccgatcttcaatcccaccacgtacaagggtcaggtgcctgagaacgaggctaacgtcgtaatcaccacactgaaagtgactgatgctgatgcccccaataccccagcgtgggaggctgtatacaccatattgaatgatgatggtggacaatttgtcgtcaccacaaatccagtgaacaacgatggcattttgaaaacagcaaagggcttggattttgaggccaagcagcagtacattctacacgtagcagtgacgaatgtggtaccttttgaggtctctctcaccacctccacagccaccgtcaccgtggatgtgctggatgtgaatgaagcccccatctttgtgcctcctgaaaagagagtggaagtgtccgaggactttggcgtgggccaggaaatcacatcctacactgcccaggagccagacacatttatggaacagaaaataacatatcggatttggagagacactgccaactggctggagattaatccggacactggtgccatttccactcgggctgagctggacagggaggattttgagcacgtgaagaacagcacgtacacagccctaatcatagctacagacaatggttctccagttgctactggaacagggacacttctgctgatcctgtctgatgtgaatgacaacgcccccataccagaacctcgaactatattcttctgtgagaggaatccaaagcctcaggtcataaacatcattgatgcagaccttcctcccaatacatctcccttcacagcagaactaacacacggggcgagtgccaactggaccattcagtacaacgacccaacccaagaatctatcattttgaagccaaagatggccttagaggtgggtgactacaaaatcaatctcaagctcatggataaccagaataaagaccaagtgaccaccttagaggtcagcgtgtgtgactgtgaaggggccgccggcgtctgtaggaaggcacagcctgtcgaagcaggattgcaaattcctgccattctggggattcttggaggaattcttgctttgctaattctgattctgctgctcttgctgtttcttcggaggagagcggtggtcaaagagcccttactgcccccagaggatgacacccgggacaacgtttattactatgatgaagaaggaggcggagaagaggaccaggactttgacttgagccagctgcacaggggcctggacgctcggcctgaagtgactcgtaacgacgttgcaccaaccctcatgagtgtcccccggtatcttccccgccctgccaatcccgatgaaattggaaattttattgatgaaaatctgaaagcggctgatactgaccccacagccccgccttatgattctctgctcgtgtttgactatgaaggaagcggttccgaagctgctagtctgagctccctgaactcctcagagtcagacaaagaccaggactatgactacttgaacgaatggggcaatcgcttcaagaagctggctgacatgtacggaggcggcgaggacgactaggggactcgagagaggcgggccccagacccatgtgctgggaaatgcagaaatcacgttgctggtggtttttcagctcccttcccttgagatgagtttctggggaaaaaaaagagactggttagtgatgcagttagtatagctttatactctctccactttatagctctaataagtttgtgttagaaaagtttcgacttatttcttaaagcttttttttttttcccatcactctttacatggtggtgatgtccaaaagatacccaaattttaatattccagaagaacaactttagcatcagaaggttcacccagcaccttgcagattttcttaaggaattttgtctcacttttaaaaagaaggggagaagtcagctactctagttctgttgttttgtgtatataattttttaaaaaaaatttgtgtgcttctgctcattactacactggtgtgtccctctgcctttttttttttttttaagacagggtctcattctatcggccaggctggagtgcagtggtgcaatcacagctcactgcagccttgtcctcccaggctcaagctatccttgcacctcagcctcccaagtagctgggaccacaggcatgcaccactacgcatgactaattttttaaatatttgagacggggtctccctgtgttacccaggctggtctcaaactcctgggctcaagtgatcctcccatcttggcctcccagagtattgggattacagacatgagccactgcacctgcccagctccccaactccctgccattttttaagagacagtttcgctccatcgcccaggcctgggatgcagtgatgtgatcatagctcactgtaacctcaaactctggggctcaagcagttctcccaccagcctcctttttatttttttgtacagatggggtcttgctatgttgcccaagctggtcttaaactcctggcctcaagcaatccttctgccttggccccccaaagtgctgggattgtgggcatgagctgctgtgcccagcctccatgttttaatatcaactctcactcctgaattcagttgctttgcccaagataggagttctctgatgcagaaattattgggctcttttagggtaagaagtttgtgtctttgtctggccacatcttgactaggtattgtctactctgaagacctttaatggcttccctctttcatctcctgagtatgtaacttgcaatgggcagctatccagtgacttgttctgagtaagtgtgttcattaatgtttatttagctctgaagcaagagtgatatactccaggacttagaatagtgcctaaagtgctgcagccaaagacagagcggaactatgaaaagtgggcttggagatggcaggagagcttgtcattgagcctggcaatttagcaaactgatgctgaggatgattgaggtgggtctacctcatctctgaaaattctggaaggaatggaggagtctcaacatgtgtttctgacacaagatccgtggtttgtactcaaagcccagaatccccaagtgcctgcttttgatgatgtctacagaaaatgctggctgagctgaacacatttgcccaattccaggtgtgcacagaaaaccgagaatattcaaaattccaaattttttcttaggagcaagaagaaaatgtggccctaaagggggttagttgaggggtagggggtagtgaggatcttgatttggatctctttttatttaaatgtgaatttcaacttttgacaatcaaagaaaagacttttgttgaaatagctttactgtttctcaagtgttttggagaaaaaaatcaaccctgcaatcactttttggaattgtcttgatttttcggcagttcaagctatatcgaatatagttctgtgtagagaatgtcactgtagttttgagtgtatacatgtgtgggtgctgataattgtgtattttctttgggggtggaaaaggaaaacaattcaagctgagaaaagtattctcaaagatgcatttttataaattttattaaacaattttgttaaaccataaaaaaaaaaaaa

SEQ ID NO: 94 - DNA, 3020 bp, Homo sapiens
agggccgggaaacacgataaaggggacatgccgggagttgcagtaccctcaggaaggtagcgtcttgatctgcgtggcgtggttctgtgccttgggaagagatgaatgggaagcggccagcggagcccggcccagcccgggtgggaaaaaagggaaagaaggaggtgatggcggagttttcggacgctgttacggaagaaaccttgaaaaagcaggtggctgaggcctggagccgcaggacgccgttcagtcacgaagtcattgtcatggacatggacccttttcttcactgtgtgatcccaaacttcatccaaagccaagacttcttagaagggcttcagaaggaactgatgaacttggacttccatgagaagtataatgatttatataagttccagcagtctgatgatttgaagaagagaagagagcctcacatctccactttaaggaaaattctgtttgaagatttccggtcctggctttctgatatttctaaaattgacctggaatcaaccattgacatgtcctgtgctaaatatgaattcactgatgccctgctgtgccatgatgatgagctggaagggcgccggattgccttcatcctgtacctggttcctccctgggacaggagcatgggtggtaccctggacctgtacagcattgatgaacactttcagccgaagcagattgtcaagtctcttatcccttcgtggaacaaactggttttctttgaagtatctcctgtgtcctttcaccaggtgtctgaagtgctgtctgaagaaaagtcacgtttgtctataagtggctggtttcatggtccatcattgactcggcctcccaactactttgaaccccccatacctcggagccctcacatcccacaagatcatgagattttgtatgattggatcaaccctacttatctggacatggattaccaagttcaaattcaagaagagtttgaagaaagttctgaaattctcctgaaggagtttcttaagcctgagaaattcacgaaagtctgtgaggccttggagcatggacatgtggaatggagcagccgaggtccccctaacaaaaggttttatgagaaagctgaggagagtaagcttcctgagatattgaaggagtgcatgaagttatttcgctctgaggcactattcttgctgctctccaacttcacaggcctgaagcttcatttcttggccccttcggaagaagatgagatgaatgataaaaaagaggcagaaaccactgatatcactgaagaagggactagccatagtcctcctgagccagagaataatcagatggccatcagcaacaacagccaacagagcaatgagcagacagacccagagccagaggaaaatgaaacaaagaaagaatcaagtgttcccatgtgccaaggggaactgaggcattggaagaccggtcactacactttaattcatgaccatagcaaggctgaatttgccctagacttaattctgtactgtggctgtgaaggctgggagccagaatatggcggttttacttcttacattgccaaaggtgaagatgaagagctgctaacagtgaatccagaaagcaattctttggcattggtctacagagacagagagactctgaaatttgtcaagcatattaaccaccgaagcctggaacaaaagaaaaccttcccaaacagaacaggtttctgggacttttcattcatctattatgaatgacagcactgggcaaagctgaacaaaaatgtgacccttcgtaattactgggaagtctgaaagagctaagcatggagtcaaggagaactacatggtagcttgcctgacagtgttcttaaaactggttgtcttttactaggactcataatgattgtcctcaaccgagaccttgagcttgcagctaagtacttatctcttgattaaaaaaaaaaagttggcttttttttttttaacatttagtcctttttccatattggcttcttcagtgaatttttaagttcaatttgtttttattgaggtaaaatatttataacataaaactgaccagcttacccatttttaaatatgcaattcagtggattaagtacattctcattgttgtccagccatcaccatcatccatctccagaagttttccatcttcccaaattctgtgcccattgaacaataactccccacctccccttcccctagcaacagccataccttttgtctctatcatcaacttcactactcatatttctcatgtaagtggaatcatacagtatttgtccttttgtgactggtttcacttagcataaagtctttaagatgcatccatgtttccagtgtttcggtttttttagaaaaactcatacgtgattgcagccgggcatggtggctcacgcctgtaatcccagcacttgggaggccaaggcaggcggatcacctgaggtcaggagttaaagaccagcctgacaaacatggagaaaccccatctctactaaaaatacaaaattagctgggcgtggtggcacatgcctgtaatcccagctactcaggaggctggggcaggagaattggttgaacccaggaggcggaggttgcagtgagccgagattgtgccactgcactccagcctgggcaacaagagtgaaactctgtctcaaaaaaaaaaaagaagaaaaaaacataagtgattgcagaattttgttcttctcataatttctggtttagaaaattatggagccttacatcctgatcatgctgggccttagaattctgacacagtgagtcatcacatttcctcccactgcctgtggccttgttccaccatgactctcacagtacagtgtaggcttagtgtagtattattcccttggaaagggtctggcctaccatcacatgccccaagaaacttctggttggtaaagaagataggctgcttattgccatgtgtagtcacttccaagtgcccactgcctttccatcctgcaattgtggcctgtgtataattaaatgattttagcctca

SEQ ID NO: 95 - DNA, 2200 bp, Homo sapiens
caggcggcggagccccaaccccacccagtgcggagcgcgccgcgagccccgccgcaagctgagcgcctccgcccgccaggcgcgccggcgccgggccatgtactcggggaaccgcagcggcggccacggctactgggacggcggcggggccgcgggcgctgaggggccggcgccggcggggacactgagccccgcgcccctcttcagccccggcacctacgagcgcctggcgctgctgctgggctccattgggctgctgggcgtcggcaacaacctgctggtgctcgtcctctactacaagttccagcggctccgcactcccactcacctcctcctggtcaacatcagcctcagcgacctgctggtgtccctcttcggggtcacctttaccttcgtgtcctgcctgaggaacggctgggtgtgggacaccgtgggctgcgtgtgggacgggtttagcggcagcctcttcgggattgtttccattgccaccctaaccgtgctggcctatgaacgttacattcgcgtggtccatgccagagtgatcaatttttcctgggcctggagggccattacctacatctggctctactcactggcgtgggcaggagcacctctcctgggatggaacaggtacatcctggacgtacacggactaggctgcactgtggactggaaatccaaggatgccaacgattcctcctttgtgcttttcttatttcttggctgcctggtggtgcccctgggtgtcatagcccattgctatggccatattctatattccattcgaatgcttcgttgtgtggaagatcttcagacaattcaagtgatcaagattttaaaatatgaaaagaaactggccaaaatgtgctttttaatgatattcaccttcctggtctgttggatgccttatatcgtgatctgcttcttggtggttaatggtcatggtcacctggtcactccaacaatatctattgtttcgtacctctttgctaaatcgaacactgtatacaatccagtgatttatgtcttcatgatcagaaagtttcgaagatcccttttgcagcttctgtgcctccgactgctgaggtgccagaggcctgctaaagacctaccagcagctggaagtgaaatgcagatcagacccattgtgatgtcacagaaagatggggacaggccaaagaaaaaagtgactttcaactcttcttccatcatttttatcatcaccagtgatgaatcactgtcagttgacgacagcgacaaaaccaatgggtccaaagttgatgtaatccaagttcgtcctttgtaggaatgaagaatggcaacgaaagatggggccttaaattggatgccacttttggactttcatcataagaagtgtctggaatacccgttctatgtaatatcaacagaaccttgtggtccagcaggaaatccgaattgcccatatgctcttgggcctcaggaagaggttgaacaaaaacaaattcttttaattcaacgggtgctttacataatgaaaaaaccacttgtggcacacgatgggcatctaacatcatcatcttctaatgtgttggagattttcatttcaaatatattttttaaattactctattttccaaaacacgttaatgcatttttctcgaaaataccttactgtaaaaataactgtcgcgtacacatgtgtgaagtagctagaacatactgaattttttttgtactgttggactctattcagtgtcatgtcctatatctgatcaagttatcaaggagataattctagaatgaaaaagaaaatcctcttgttggaaacaaaagacgttttatatgtgcagtatgacaaagaggagtttcagagacaactttgaatccttgtcagcctggagaccagcaccagaggaatctacaaggcaaactcccatatatttgcttcccccaaattgctgcccctacagactcaaagctctttttctttgttttgttgtttctctaaaaatttactgttctttgtcgatgctatataagccagggagttctaagacgccagctctttgagatttgctcattcccctgtatttcccacatatatattacatatacccgctaataaatttatgtttgttttaaaaaaaaaaaaaaaaaaaaaaaaaaaaaaaaaaaaaaaaaaaaaaaaaaaaaaaaaaaaaaaaaaaaaaaaaaaaaa

SEQ ID NO: 96 - DNA, 802 bp, Homo sapiens
gcggtttgctaagtggtcggttcctggagctgcggtcttctgctagcctgatccgcagcttcagcctccgccgcctcctcagccctcggcgccgccgcctgacccgcaggccgccgcgggccgcagagcccatgagggcgcgggcaccgccgccgcctccgcggcgtcgccgtcgtcccggagcgccccgagctggcgcgggcatggccgcggcatgagcgtggagccgccgccggagctggaggagaaggcggcgtcggagcccgaggcgggagccatgccggagaagcgcgcgggcgcgcaggccgcggggagcacctggctacaaggctttggcccaccaagtgtgtaccatgctgctattgtcatcttccttgaattctttgcgtggggccttttgacaactccaatgttgactgttctacatgaaacattttctcaacacacattcctcatgaatggtctcattcaaggtgtaaagggcctgctctcttttttgagtgccccactcattggtgccctgtctgatgtgtgggggaggaagccctttctcctcggcactgtattctttacctgcttcccaatcccactgatgaggatcagcccatgccgggtgtggtggcgtgcacctgtagtcccagctacctgtggcaggagaatggcttgaacccaggaagcggaggttgcagtgagccaagatcacaccattgcactccagcctaggcatggtgagactccatctcaaaaaaaaaaaaaaattaaattgtattgattttctcttttcaaaaaaaaaaaaaaaaaa

SEQ ID NO: 97 - DNA, 4549 bp, Homo sapiens
cggcaggaaggccatggcggggcccgagcgctggggccccctgctcctgtgcctgctgcaggccgctccagggaggccccgtctggcccctccccagaatgtgacgctgctctcccagaacttcagcgtgtacctgacatggctcccagggcttggcaacccccaggatgtgacctattttgtggcctatcagagctctcccacccgtagacggtggcgcgaagtggaagagtgtgcgggaaccaaggagctgctatgttctatgatgtgcctgaagaaacaggacctgtacaacaagttcaagggacgcgtgcggacggtttctcccagctccaagtccccctgggtggagtccgaatacctggattacctttttgaagtggagccggccccacctgtcctggtgctcacccagacggaggagatcctgagtgccaatgccacgtaccagctgcccccctgcatgcccccactggatctgaagtatgaggtggcattctggaaggagggggccggaaacaagaccctatttccagtcactccccatggccagccagtccagatcactctccagccagctgccagcgaacaccactgcctcagtgccagaaccatctacacgttcagtgtcccgaaatacagcaagttctctaagcccacctgcttcttgctggaggtcccagaagccaactgggctttcctggtgctgccatcgcttctgatactgctgttagtaattgccgcagggggtgtgatctggaagaccctcatggggaacccctggtttcagcgggcaaagatgccacgggccctggacttttctggacacacacaccctgtggcaacctttcagcccagcagaccagagtccgtgaatgacttgttcctctgtccccaaaaggaactgaccagaggggtcaggccgacgcctcgagtcagggccccagccacccaacagacaagatggaagaaggaccttgcagaggacgaagaggaggaggatgaggaggacacagaagatggcgtcagcttccagccctacattgaaccaccttctttcctggggcaagagcaccaggctccagggcactcggaggctggtggggtggactcagggaggcccagggctcctctggtcccaagcgaaggctcctctgcttgggattcttcagacagaagctgggccagcactgtggactcctcctgggacagggctgggtcctctggctatttggctgagaaggggccaggccaagggccgggtggggatgggcaccaagaatctctcccaccacctgaattctccaaggactcgggtttcctggaagagctcccagaagataacctctcctcctgggccacctggggcaccttaccaccggagccgaatctggtccctgggggacccccagtttctcttcagacactgaccttctgctgggaaagcagccctgaggaggaagaggaggcgagggaatcagaaattgaggacagcgatgcgggcagctggggggctgagagcacccagaggaccgaggacaggggccggacattggggcattacatggccaggtgagctgtcccccgacatcccaccgaatctgatgctgctgctgcctttgcaaggactactgggcttcccaagaaactcaagagcctccgtacctcccctgggcggcggaggggcattgcacttccgggaagtccacctagcggctgtttgcctgtcgggctgagcaacaagatgcccctccctcctgtgacccgccctctttaggctgagctataagaggggtggacacagggtgggctgaggtcagaggttggtggggtgtcatcacccccattgtccctagggtgacaggccagggggaaaaattatccccggacaacatgaaacaggtgaggtcaggtcactgcggacatcaagggcggacaccaccaaggggccctctggaacttgagaccactggaggcacacctgctatacctcatgcctttcccagcagccactgaactcccccatcccagggctcagcctcctgattcatgggtcccctagttaggcccagataaaaatccagttggctgagggttttggatgggaagggaagggtggctgtcctcaaatcctggtctttggagtcatggcactgtacggttttagtgtcagacagaccggggttcaaatcccagctctgctgttcactggttgtatgatcttggggaagacatcttccttctctgcctcggcttcctcatctgcagctacgcctgggtgtggtgagggttctaggggatctcagatgtgtgtagcacggagcctgctgtgtcctgggtgctctctacgtggtggccggtagaattctccatctatccaggctccaggagacccctgggcatctcccacctgtggcccctaaacccagagtgactgagagcacttaacattcagcttgtctcatccccagtctacctccttccttctaccctcactgcctcccagtcaggagagtgagctctcagaagccagagccccacccaaggggaccctggtctctccgccttcacctagcaatgggaaccctgcttcccaggggaggaaccaactgctccaccttctagggacccagtttgttggagtaggacagtaacatggcaggaatcggacttctgggcctgtaatcccagtttggatggcacgttagactcttggttgaccgttgtggtccttagaagtcccattctcccttccagttatgagaaaccaatgccttctagattcaggtgactatccttacctgggggtgctgatgcatcctcagttaacctacacccacctgaatatagatgagcgtagctgagttttcacccgtaggaccgaagtgttttgtggtggagtatctgaacaaccttggctctgtggccattcaacctgccaggactaacatttctggatttgtgaagaagggatcttcaaagccattgaacccacagagctgtgttgctttaaagccaccacaagggtacagcattaaatggcagaactggaaaagcttcttagggcatctcatccagggattctcaaaccatgtcccccagaggccttgggctgcagttgcagggggcgccatggggctataggagcctcccactttcaccagagcagcctcactgtgccctgattcacacactgtggctttccacgtgaggttttgtttagagggatccactactcaagaaaaagttagcaaaccactccttttgttgcaaaggagctgaggtcaagggtggcaaaggcacttgtccaaggtcgcccagcagtgctgctctgatgacttgtgcacatccccaagggtaagagcttcgatctctgcacagccgggccaacctctgaccccttgtccatgtcagtaaaatatgaaggtcacagccaggatttctaagggtcaggaggccttcaccgctgctggggcacacacacacacatgcatacacacatacgacacacacctgtgtctccccaggggttttccctgcagtgaggcttgtccagatgattgagcccaggagaggaagaacaaacaaactacggagctggggagggctgtggcttggggccagctcccagggaaattcccagacctgtaccgatgttctctctggcaccagccgagctgcttcgtggaggtaacttcaaaaaagtaaaagctatcatcagcatcatcttagacttgtatgaaataaccactccgtttctattcttaaaccttaccatttttgttttgttttgtttttttgagtcggagttttgttctttttgcctaggctggagtgcagtggtacaatctcggctcactgcaacctccacctcccgggttcaagtgattctcctgcctcagcctcccaagtagctgggattacaggcacccgccaccacacctggctaatttttttgtatttttagtagagacggggtttcaccatgttggccaggctggtctcgaactcctgacctcaggtgatccgcccgcctcggcctcccaaagtgctgggattacaggcgtgagccaccgcgcccagccaaaccttactatttttttaaagaattttttccagagtttaatttctgacatagcttaagttttccagtaactctaaactccatctcctttatcgtcattaagtcattcacaaaaagccaggagaagcatttggaaagggcatgataatcagtataataatttgccttgtgtggtcagcacttaactgtttacaaagccctttcacgtgcacagcaggtgggaactgcgcggtgtgggctgggcctgcgctggaagcatatcccgtgaaaagtgttagtgccttaggtgaaagcaacatgtatccctttagactactaacggtatatgttgttcttatgtatttgtatttatttctattttttctatgtttatgtcatatttaaacgatatcctactgcttgttggtattaccctaaactgtttaaataaagagctctatttttaaagaaaaaaggtacaattga

SEQ ID NO: 98 - DNA, 3328 bp, Homo sapiens
aggcgctagaggcgggggcgccgggaggcgcgggctttgctcctggggtctcggccttggccggctggacctgaccctagggcggcttgcgcagctgtcgggacgtgactgcgttcagccgcgtcgggcgtgcttcccagacttgcccaagttcgggtgccctagctgcccctttgcagccgctggcctacccggcccgcgggtgagaaggttgcgacgggaggtgggtggaactcgccagcgccgggaccgcggattggctgcctcggctttctcttttccccgtgggctccggcgtgaggcgctgaagcggccggcagccggcgaccggccctcaccgtccgccgggttgcgctctgcttttgcggtgaggcgttgaccacgcccatatgaattggagctctccgccagtaggagtttccggaaggagtttgaatttttgtgatttttatgcttgtttggtcggtggaatatgttgggatttatgtttgcctctgaacaagtgtcttgctcacatcgtaaatgactttctctccgaaacgctaaatattctttcccgcaggagctcatatccttattttccatgacagatcttaacgacaatatatgcaaaagatatataaagatgataactaatatagttatactgagcctgatcatttgcatttcgttagctttctggattatatcaatgactgcaagcacctattatggtaacttacgacctatttctccgtggcgttggctgttttctgttgttgttcctgttctgatcgtctctaatggccttaaaaagaaaagtctagatcacagtggggctctaggagggctagtcgttggatttatcctaaccattgcaaatttcagcttttttacctctttgctgatgtttttcttgtcttcttcgaaactcactaaatggaagggagaagtgaagaagcgtctagattcagaatataaggaaggtgggcaaaggaattgggttcaggtgttctgtaatggagctgtacccacagaactggccctgctgtacatgatagaaaatggccccggggaaatcccagtcgatttttccaagcagtactccgcttcctggatgtgtttgtctctcttggctgcactggcctgctctgctggagacacatgggcttcagaagttggcccagttctgagtaaaagttctccaagactgataacaacctgggagaaagttccagttggtaccaatggaggagttacagtggtgggccttgtctccagtctccttggtggtacctttgtgggcattgcatacttcctcacacagctgatttttgtgaatgatttagacatttctgccccgcagtggccaattattgcatttggtggtttagctggattactaggatcaattgtggactcatacttaggggctacaatgcagtatactgggttggatgaaagcactggcatggtggtcaacagcccaacaaataaggcaaggcacatagcagggaaacccattcttgataacaacgcagtgaatctgttttcttctgttcttattgccctcttgctcccaactgctgcttggggtttttggcccagggggtgaactttatttcatttccacaggttgaaactggtgagtccagctaaatttgcaattccaactttcatcctaagaataataactgtaatggcaaagcggaaatgccagttcctcctgtattccattgagatgggatttcacattttcctctcatcaactcccctgtaatagctagcgtctttctagtgaaagagaagaattcctagaacttatgcatttttttcctgctgaatggaagtcttgagcaatgaagctatattgtccctacatattactatatattgaactgaaagttcttacataatcaatgtcaagttttgtcttattttgttttgtttgtttaaaccagtgtaggaaataaaagtgatgatatttaaaatagttctcagttgaagcagagaaatgccactgtgctagttgcccaaatgttgtatctattttaaatagtttaagctgatgtgtatgggagcctaaacaagtgtagtatcctgaacttctcccattaattgctattcacaattgggaaaagtgtggagattggttcctagtgagttttgtggcctactccacatttgttcttccttcctcagggttagtgatgaaaaaaagtaaatatctttttcatatgtccattagaatgtatgaaaaaaatcattttaactaaaagcaaaagaattttatcttatatctaaaaaatatataacttactatatgtttcagttgctctctgaacaaaaattatcttcaatttaatatgtggaatgtgttttctagctttctttgaattatgtatggcaacctggtttagcactggcatcctgaacagttaagagtcactgggaaattattgtatttctttataaatttactgtcatatcaattgctggaaaatgctatgatttttctattattaccttctaagttgtattctctcttacactgtagcctcaactaaggcaattctgctatgtttgttcttcactatgatttactgtgtgccaaaggagttttgacagggtacagagtattttactaaaagtatttttaaatgtttctcatgtgatttctgtaccttcttcctcctgccccttttgcttttttaaagaaactggggaaggatttatgaatacaccaccaccagagtggataatgcttagaattctttattggtggccctactatggtgatgatctagaactgacttacttcaggacagaagaaaaaacaatcacacccttaacctttaagccagttagatcagggggttgcaacaattgggttaaactttgggtatacattggaagcaccagggcatgtttgctttttttgtttatgtgtttgttttttgagacagagtctcacactgtggcccaggctggactccagcacagtggcatgatctcagctccgcctcctgggttcacgtgattctcatgcctcagcctcccgggtggctgggatcacaggcgtgcaccatcacgcccggctaatttttgtattttcagtcgagaccggcctggccaacgtggtgaaacaccgtctctactaaaaatacaaaaaattaggtgtggtggtgcgtgcctgtattcccggccactcgggaggctgaggcaggagaatcgctggaacctgggatgtggaggttgcagtgagccaagattgcaccactgtactccagcctgggcaacagagggagactccatctagactccatctcaaaaaaaaaaaaaaaaaaaa

SEQ ID NO: 99 - DNA, 3115 bp, Homo sapiens
cgctcccaggaggaacgagaatgaatatgactcaagcccgggttctggtggctgcagtggtggggttggtggctgtcctgctctacgcctccatccacaagattgaggagggccatctggctgtgtactacaggggaggagctttactaactagccccagtggaccaggctatcatatcatgttgcctttcattactacgttcagatctgtgcagacaacactacaaactgatgaagttaaaaatgtgccttgtggaacaagtggtggggtcatgatctatattgaccgaatagaagtggttaatatgttggctccttatgcagtgtttgatatcgtgaggaactatactgcagattatgacaagaccttaatcttcaataaaatccaccatgagctgaaccagttctgcagtgcccacacacttcaggaagtttacattgaattgtttgatcaaatagatgaaaacctgaagcaagctctgcagaaagacttaaacctcatggccccaggtctcactatacaggctgtgcgtgttacaaaacccaaaatcccagaagccataagaagaaattttgagttaatggaggctgagaagacaaaactccttatagctgcacagaaacaaaaggttgtggaaaaagaagctgagacagagaggaaaaaggcagttatagaagcagagaagattgcacaagtggcaaaaattcggtttcagcagaaagtgatggaaaaagaaactgaaaagcgcatttctgaaatcgaagatgctgcattcctggcccgagagaaagcgaaagcagatgctgaatattatgctgcacacaaatatgccacctcaaacaagcacaagttgaccccggaatatctggagctcaaaaagtaccaggccattgcttctaacagtaagatctattttggcagcaacatccctaacatgttcgtggactcctcatgtgctttgaaatattcagatattaggactggaagagaaagctcactcccctctaaggaggctcttgaaccctctggagagaacgtcatccaaaacaaagagagcacaggttgatgcaagaggtggaaatgttctccatatcaagatgtggcccaaggggttaagtgggaacaatcattatacggactcttcagatttacagagaacttacacttcatctgttccacctctcctgcgatagtcctgggtgctccactgattggaggatagagccagctgtctgacacacaaatggtcttttcagccacagtcttatcaagtatcctatatgtattcctttctaaactgctactcatgaatgaggaaagtcttgctaagatactgcctgcactggaatgttaaacactaaatatataacaagctgtgttttcctaagctgagatctgttgaataatgtttacattcgtcccccggggaaatgtatgctcagccaccattcaagagatgactgagaaggagatggtaagttcaagaagactgattgcacctgggacccaggccctttctttgggatccagtcccagccttcatccatgtgattaagatccaggccgctgaagttccccaggaaatgatcttccacttgagcaaccttttacttgatacgatttgcacctttctgttttcctgcagtcagggtggtggcctgcagggacctgagctttgctacccaaccagattcctcatagagattcctaatcactagtttcttgtattcataaactcagagatacagagggcttggtttgaagttggggtgagatgaaacctttgctctgagccaaagctctggggccctgcattccctgcattgggttgatgactgtcagcatcactgccgcaggccatgcttgactaaggtacctggttttagccacagccacctccttgtatgttacctttcagctctggccaagagtgggacagggttttaaccacaaataggagcagcatgcaattcctagtgacttgctgcacagtattgtatcataattacaggaagtttttatttttaaaactggatctggggtatattcatttgccccatcacctctgtctaaaggcccaagtcctagggctgccatggtcacaagcacactgatgctccttaagattgtttatctggagcccacatagtgtggaacaaaaagtcacctagaaagcatccttggtcatcattgtctccttcccacctggcccagagatgcttaaatccaagttgtttctccagctgtcacctcccccaggagatcaggattccactgacgtcctgggcagccagtgaatttaattttccatgagaaacaacagagttaacctgtggcattaggagacctacttcatgtggaccctttttttccttcagtttaacttttctggagcagtgtgctgcgtagttcggcctgagtttgtgcagcttgttaagacaactcttgtgtacgctatgttgaagctcaacaaaaaagtcatgggaccacttctagaaatctttcagctgtcaggcctgtcagtctcatgacagtttgttggttgtgccaaacactttatttgggaaaggaaagcccagatttgaatgggtctttcccctgggccttatcctatagaggcatttgtaatatggagaaaataatttttcatttttgctcatttaattctataaattctctttataaatgaattttgtgttctttagttctccttaaaagaacttttgaattataaaaataaaatctttacctgtcgaattgttgctgcagatgattgttgtggaaaatctggatcattgacctctgtgctttcattcctagagatgttttatagttacatgagcaaaagctgttgccccaaagtgatggccctggaggcggggctgaggaacagggaaatgccgctgtgaagtcttaaagcacttctgcttaaactccatgtgtgaggagtgtgcctccctgtgccctctcagctctgaggctggccgtctttcggggtgttccttttggcaaatatacactgtaatcttgagtctaaatttatatgttgaaatgctaccttttttaaaataagaaactaaataaaattattttactatcaaaaaaaaaaaaaaa

SEQ ID NO: 100 - DNA, 8680 bp, Homo sapiens
acggggcctgaagcggcggtaccggtgctggcggcggcagctgaggccttggccgaagccgcgcgaacctcagggcaagatgcttggaaccggacctgccgccgccaccaccgctgccaccacatctagcaatgtgagcgtcctgcagcagtttgccagtggcctaaagagccggaatgaggaaaccagggccaaagccgccaaggagctccagcactatgtcaccatggaactccgagagatgagtcaagaggagtctactcgcttctatgaccaactgaaccatcacatttttgaattggtttccagctcagatgccaatgagaggaaaggtggcatcttggccatagctagcctcataggagtggaaggtgggaatgccacccgaattggcagatttgccaactatcttcggaacctcctcccctccaatgacccagttgtcatggaaatggcatccaaggccattggccgtcttgccatggcaggggacacttttaccgctgagtacgtggaatttgaggtgaagcgagccctggaatggctgggtgctgaccgcaatgagggccggagacatgcagctgtcctggttctccgtgagctggccatcagcgtccctaccttcttcttccagcaagtgcaacccttctttgacaacatttttgtggccgtgtgggaccccaaacaggccatccgtgagggagctgtagccgcccttcgtgcctgtctgattctcacaacccagcgtgagccgaaggagatgcagaagcctcagtggtacaggcacacatttgaagaagcagagaagggatttgatgagaccttggccaaagagaagggcatgaatcgggatgatcggatccatggagccttgttgatccttaacgagctggtccgaatcagcagcatggagggagagcgtctgagagaagaaatggaagaaatcacacagcagcagctggtacacgacaagtactgcaaagatctcatgggcttcggaacaaaacctcgtcacattacccccttcaccagtttccaggctgtacagccccagcagtcaaatgccttggtggggctgctggggtacagctctcaccaaggcctcatgggatttgggacctcccccagtccagctaagtccaccctggtggagagccggtgttgcagagacttgatggaggagaaatttgatcaggtgtgccagtgggtgctgaaatgcaggaatagcaagaactcgctgatccaaatgacaatccttaatttgttgccccgcttggctgcattccgaccttctgccttcacagatacccagtatctccaagataccatgaaccatgtcctaagctgtgtcaagaaggagaaggaacgtacagcggccttccaagccctggggctactttctgtggctgtgaggtctgagtttaaggtctatttgcctcgcgtgctggacatcatccgagcggccctgcccccaaaggacttcgcccataagaggcagaaggcaatgcaggtggatgccacagtcttcacttgcatcagcatgctggctcgagcaatggggccaggcatccagcaggatatcaaggagctgctggagcccatgctggcagtgggactaagccctgccctcactgcagtgctctacgacctgagccgtcagattccacagctaaagaaggacattcaagatgggctactgaaaatgctgtccctggtccttatgcacaaaccccttcgccacccaggcatgcccaagggcctggcccatcagctggcctctcctggcctcacgaccctccctgaggccagcgatgtgggcagcatcactcttgccctccgaacgcttggcagctttgaatttgaaggccactctctgacccaatttgttcgccactgtgcggatcatttcctgaacagtgagcacaaggagatccgcatggaggctgcccgcacctgctcccgcctgctcacaccctccatccacctcatcagtggccatgctcatgtggttagccagaccgcagtgcaagtggtggcagatgtgcttagcaaactgctcgtagttgggataacagatcctgaccctgacattcgctactgtgtcttggcgtccctggacgagcgctttgatgcacacctggcccaggcggagaacttgcaggccttgtttgtggctctgaatgaccaggtgtttgagatccgggagctggccatctgcactgtgggccgactcagtagcatgaaccctgcctttgtcatgcctttcctgcgcaagatgctcatccagattttgacagagttggagcacagtgggattggaagaatcaaagagcagagtgcccgcatgctggggcacctggtctccaatgccccccgactcatccgcccctacatggagcctattctgaaggcattaattttgaaactgaaagatccagaccctgatccaaacccaggtgtgatcaataatgtcctggcaacaataggagaattggcacaggttagtggcctggaaatgaggaaatgggttgatgaactttttattatcatcatggacatgctccaggattcctctttgttggccaaaaggcaggtggctctgtggaccctgggacagttggtggccagcactggctatgtagtagagccctacaggaagtaccctactttgcttgaggtgctactgaattttctgaagactgagcagaaccagggtacacgcagagaggccatccgtgtgttagggcttttaggggctttggatccttacaagcacaaagtgaacattggcatgatagaccagtcccgggatgcctctgctgtcagcctgtcagaatccaagtcaagtcaggattcctctgactatagcactagtgaaatgctggtcaacatgggaaacttgcctctggatgagttctacccagctgtgtccatggtggccctgatgcggatcttccgagaccagtcactctctcatcatcacaccatggttgtccaggccatcaccttcatcttcaagtccctgggactcaaatgtgtgcagttcctgccccaggtcatgcccacgttccttaacgtcattcgagtctgtgatggggccatccgggaatttttgttccagcagctgggaatgttggtgtcctttgtgaagagccacatcagaccttatatggatgaaatagtcaccctcatgagagaattctgggtcatgaacacctcaattcagagcacgatcattcttctcattgagcaaattgtggtagctcttgggggtgaatttaagctctacctgccccagctgatcccacacatgctgcgtgtcttcatgcatgacaacagcccaggccgcattgtctctatcaagttactggctgcaatccagctgtttggcgccaacctggatgactacctgcatttactgctgcctcctattgttaagttgtttgatgcccctgaagctccactgccatctcgaaaggcagcgctagagactgtggaccgcctgacggagtccctggatttcactgactatgcctcccggatcattcaccctattgttcgaacactggaccagagcccagaactgcgctccacagccatggacacgctgtcttcacttgtttttcagctggggaagaagtaccaaattttcattccaatggtgaataaagttctggtgcgacaccgaatcaatcatcagcgctatgatgtgctcatctgcagaattgtcaagggatacacacttgctgatgaagaggaggatcctttgatttaccagcatcggatgcttaggagtggccaaggggatgcattggctagtggaccagtggaaacaggacccatgaagaaactgcacgtcagcaccatcaacctccaaaaggcctggggcgctgccaggagggtctccaaagatgactggctggaatggctgagacggctgagcctggagctgctgaaggactcatcatcgccctccctgcgctcctgctgggccctggcacaggcctacaacccgatggccagggatctcttcaatgctgcatttgtgtcctgctggtctgaactgaatgaagatcaacaggatgagctcatcagaagcatcgagttggccctcacctcacaagacatcgctgaagtcacacagaccctcttaaacttggctgaattcatggaacacagtgacaagggccccctgccactgagagatgacaatggcattgttctgctgggtgagagagctgccaagtgccgagcatatgccaaagcactacactacaaagaactggagttccagaaaggccccacccctgccattctagaatctctcatcagcattaataataagctacagcagccggaggcagcggccggagtgttagaatatgccatgaaacactttggagagctggagatccaggctacctggtatgagaaactgcacgagtgggaggatgcccttgtggcctatgacaagaaaatggacaccaacaaggacgacccagagctgatgctgggccgcatgcgctgcctcgaggccttgggggaatggggtcaactccaccagcagtgctgtgaaaagtggaccctggttaatgatgagacccaagccaagatggcccggatggctgctgcagctgcatggggtttaggtcagtgggacagcatggaagaatacacctgtatgatccctcgggacacccatgatggggcattttatagagctgtgctggcactgcatcaggacctcttctccttggcacaacagtgcattgacaaggccagggacctgctggatgctgaattaactgcgatggcaggagagagttacagtcgggcatatggggccatggtttcttgccacatgctgtccgagctggaggaggttatccagtacaaacttgtccccgagcgacgagagatcatccgccagatctggtgggagagactgcagggctgccagcgtatcgtagaggactggcagaaaatccttatggtgcggtcccttgtggtcagccctcatgaagacatgagaacctggctcaagtatgcaagcctgtgcggcaagagtggcaggctggctcttgctcataaaactttagtgttgctcctgggagttgatccgtctcggcaacttgaccatcctctgccaacagttcaccctcaggtgacctatgcctacatgaaaaacatgtggaagagtgcccgcaagatcgatgccttccagcacatgcagcattttgtccagaccatgcagcaacaggcccagcatgccatcgctactgaggaccagcagcataagcaggaactgcacaagctcatggcccgatgcttcctgaaacttggagagtggcagctgaatctacagggcatcaatgagagcacaatccccaaagtgctgcagtactacagcgccgccacagagcacgaccgcagctggtacaaggcctggcatgcgtgggcagtgatgaacttcgaagctgtgctacactacaaacatcagaaccaagcccgcgatgagaagaagaaactgcgtcatgccagcggggccaacatcaccaacgccaccactgccgccaccacggccgccactgccaccaccactgccagcaccgagggcagcaacagtgagagcgaggccgagagcaccgagaacagccccaccccatcgccgctgcagaagaaggtcactgaggatctgtccaaaaccctcctgatgtacacggtgcctgccgtccagggcttcttccgttccatctccttgtcacgaggcaacaacctccaggatacactcagagttctcaccttatggtttgattatggtcactggccagatgtcaatgaggccttagtggagggggtgaaagccatccagattgatacctggctacaggttatacctcagctcattgcaagaattgatacgcccagacccttggtgggacgtctcattcaccagcttctcacagacattggtcggtaccacccccaggccctcatctacccactgacagtggcttctaagtctaccacgacagcccggcacaatgcagccaacaagattctgaagaacatgtgtgagcacagcaacaccctggtccagcaggccatgatggtgagcgaggagctgatccgagtggccatcctctggcatgagatgtggcatgaaggcctggaagaggcatctcgtttgtactttggggaaaggaacgtgaaaggcatgtttgaggtgctggagcccttgcatgctatgatggaacggggcccccagactctgaaggaaacatcctttaatcaggcctatggtcgagatttaatggaggcccaagagtggtgcaggaagtacatgaaatcagggaatgtcaaggacctcacccaagcctgggacctctattatcatgtgttccgacgaatctcaaagcagctgcctcagctcacatccttagagctgcaatatgtttccccaaaacttctgatgtgccgggaccttgaattggctgtgccaggaacatatgaccccaaccagccaatcattcgcattcagtccatagcaccgtctttgcaagtcatcacatccaagcagaggccccggaaattgacacttatgggcagcaacggacatgagtttgttttccttctaaaaggccatgaagatctgcgccaggatgagcgtgtgatgcagctcttcggcctggttaacacccttctggccaatgacccaacatctcttcggaaaaacctcagcatccagagatacgctgtcatccctttatcgaccaactcgggcctcattggctgggttccccactgtgacacactgcacgccctcatccgggactacagggagaagaagaagatccttctcaacatcgagcatcgcatcatgttgcggatggctccggactatgaccacttgactctgatgcagaaggtggaggtgtttgagcatgccgtcaataatacagctggggacgacctggccaagctgctgtggctgaaaagccccagctccgaggtgtggtttgaccgaagaaccaattatacccgttctttagcggtcatgtcaatggttgggtatattttaggcctgggagatagacacccatccaacctgatgctggaccgtctgagtgggaagatcctgcacattgactttggggactgctttgaggttgctatgacccgagagaagtttccagagaagattccatttagactaacaagaatgttgaccaatgctatggaggttacaggcctggatggcaactacagaatcacatgccacacagtgatggaggtgctgcgagagcacaaggacagtgtcatggccgtgctggaagcctttgtctatgaccccttgctgaactggaggctgatggacacaaataccaaaggcaacaagcgatcccgaacgaggacggattcctactctgctggccagtcagtcgaaattttggacggtgtggaacttggagagccagcccataagaaaacggggaccacagtgccagaatctattcattctttcattggagacggtttggtgaaaccagaggccctaaataagaaagctatccagattattaacagggttcgagataagctcactggtcgggacttctctcatgatgacactttggatgttccaacgcaagttgagctgctcatcaaacaagcgacatcccatgaaaacctctgccagtgctatattggctggtgccctttctggtaactggaggcccagatgtgcccatcacgttttttctgaggcttttgtactttagtaaatgcttccactaaactgaaaccatggtgagaaagtttgactttgttaaatattttgaaatgtaaatgaaaagaactactgtatattaaaagttggtttgaaccaactttctagctgctgttgaagaatatattgtcagaaacacaaggcttgatttggttcccaggacagtgaaacaatagtaataccacgtaaatcaagccattcattttggggaacagaagatccataactttagaaatacgggttttgacttaactcacaagagaactcatcataagtacttgctgatggaagaatgacctagttgctcctctcaacatgggtacagcaaactcagcacagccaagaagcctcaggtcgtggagaacatggattaggatcctagactgtaaagacacagaagatgctgacctcacccctgccacctatcccaagacctcactggtctgtggacagcagcagaaatgtttgcaagataggccaaaatgagtacaaaaggtctgtcttccatcagacccagtgatgctgcgactcacacgcttcaattcaagacctgaccgctagtagggaggtttattcagatcgctggcagcctcggctgagcagatgcacagaggggatcactgtgcagtgggaccaccctcactggccttctgcagcagggttctgggatgttttcagtggtcaaaatactctgtttagagcaagggctcagaaaacagaaatactgtcatggaggtgctgaacacagggaaggtctggtacatattggaaattatgagcagaacaaatactcaactaaatgcacaaagtataaagtgtagccatgtctagacaccatgttgtatcagaataatttttgtgccaataaatgacatcagaattttaaacata

SEQ ID NO: 101 - DNA, 1925 bp, Homo sapiens
caggcggaagccggggagaaggcccaggaagtgacggccgcctcccggctaccggggacttctggagtccgagaagtcaacggcgcggttgctgcggccgccgcgctccccggcccgaggcgatggagaacggagcggtgtacagccccactacggaggaggacccgggccccgccagaggcccccggagcggcctcgctgcctactttttcatgggccggctcccattgctccggcgcgttctcaagggcttgcagctgttgctgtctctgctggccttcatctgtgaagaagttgtatcacaatgtactttatgtggaggactttatttttttgagtttgtaagctgcagtgcctttcttctgagtctccttatactgattgtgtattgcactccattttatgagagagttgataccacaaaagtaaaatcatcggatttttatattactttgggaacaggatgtgtgtttttgttggcatccatcatttttgtttccacacatgacaggacttcagctgagattgctgcaattgtgtttggatttatagcaagttttatgttcctacttgactttatcactatgctgtatgaaaaacgacaggagtcccagctgagaaaacctgaaaataccactagggctgaagccctcactgagccacttaatgcctaaagactctggggagcagatgttacctaaggtagtgaccctgcattgtggtgcctgagccctggcagaagctcttgtaaaatttgttaattgtttaaaccacttcttttggagagcaaggggaaggtcaagaaggcagttttatcaatattgtgtcagtcaccacaaagtaggccagataagttaaaaaaaatttttttttaaataataattgaaacttatctcaaatggagattttggtgggaggaggagaaaacaattgtttttaaatcacacagctcaacggttgataaatgattctgtcattctgttacaggtcattcttttactaggcttagcttccaaattatgctttatagctgtataaacatcgtgattatattcatctacttagaaattgttttatttttaaattaatttgcttagctgtttgttttgatgcttagattatgttctgttaatgggaatttaacatatttaagaaaccaatatttaaaatgttggtctaggtttttttccttaacatatattaccaggctttactgtatttcactcagccttaaatgttataatatttttggataacggttattaattctttgagaccttcgtatagcctataaaatgtatgggagatgttggtattttatgtgtataaaagcaacaatatcagcaacttcgtgtttatactgcaccttggttgttgatgtcaagtaaaaaaaagattgttttgtaacacataaaaaaatggaagaaactgataccacacctaaggaccaaagataagaaagactttttgcccaagacagtgaaagtaattataaaaacaagctttgaccacttaccaagtatctgaagagatgagttcatactatgatttagaaagtggttcaattcccctgttggcatatgattatttttactaaaattaatacagctctgtgggtcttccttagtgttttctttgaagccaatctgttttttttaggacaccagcctttggtttttcatctgttcgagatgcctcttctctgtctccttatcagatagaaatggagtcatgtgctgctgcttcatctagcagaggttggcctctggctctgacactttttgtcagttgtctttaggtggtcctgaatcttgggcccttttgattgtgaatactgtgtagcaggatcttgagagtccttgttcttacataggcattgctctagtttgtctttggcaaaaaaaaaaaaaaaaaaaaaaaaaaaa

SEQ ID NO: 102 - DNA, 875 bp, Homo sapiens
caagtactccaacaaaaagagagattatgctaacaccagtgactgtggcttatagtccaaagcgatcccctaaagaaaacttgtccccaggatttagtcatctgcttagcaaaaatgagagcagtccaattcgatttgatatacttttggatgatttagatactgttcctgtgtctacattacaacgtaccaatccaagaaagcaactccagtttcttcctctagatgactcggaagaaaaaacttattctgagaaagccaccgataaccatgttaatcatagctcttgccctgaaccggtgccaaatggagtgaagaaagtatctgtgagaacagcctgggagaagaataaatcagttagctacgaacagtgtaagccggtttcagtcactccacaggggaatgattttgaatatacagcaaaaattcggaccctagctgaaacagaacgattttttgatgaacttacaaaagaaaaggaccagattgaggcagcactaagcaggatgccttctcctggaggacgaatcactttacagacaagattaaatcagacccctcagatatgtgaggaatcaagccataaatgtgcatttgctggacattatgtaccatgtcatctctatgactacagatttcaaggataatttttacatctaacaatttcactgtaacagtgaccgataatgtgagaaatgtgctttttacagtgctgctggtgggtagacaagtgcttgctgcagttgtttctgaatctagccagatgctggagtcgtgaagctgtaagctccgcgggagcagggaccatctctctttcttgcactacaggcactcaataaatacttgtggctgtgaaaaaaaaaaaaaaaaaaaaa

SEQ ID NO: 103 - DNA, 654 bp, Homo sapiens
gcagatggtaggaaatggagacggagaaatggcactaatggcccagccacctgagatgggatacctgggagggacatcttttcaagtagaggctgtgttggggcatggtgagagagggtcttagcaggtaaccttcctttcctctccagactgaggaatcagagttctgattgtggagtgcctctctctaggacggggctgcagcataggagtctcagctgcttacatccaggtccaggattatgtctgctaacagacgctggtgggtaccacctgacgacgaagactgtgtgtctgagaagctcctgaggaagactcgggaatctccactggtgcctataggcttaggaggctgcttggtggtagcagcatacaggatttaccggctgaggtctcgtggttccaccaagatgtccatacacctgattcacacccgagtggcagcgcaggcctgtgcagtgggtgcaatcatgctaggtgctgtgtacacaatgtacagcgattacgtcaagaggatggcacaggatgctggagagaagtaggactcctataggagccggggctgtccaactcccctaactcaatccctggtacattcctaataaagcagttttgaggaaaaacaaaaaaaaaaaaaaaaaaaaaaaaaaaaaa

SEQ ID NO: 104 - DNA, 1433 bp, Homo sapiens
gggaggtaagtagaaaccgttgatgggactgagaaaccagagttaaaacctctttggagcttctgagggctcagctggaaccaacgggcacagttggcaacaccatcatgacatcacaacctgttcccaatgagaccatcatagtgctcccatcaaatgtcatcaacttctcccaagcagagaaacccgaacccaccaaccaggggcaggatagcctgaagaaacatctacacgcagaaatcaaagttattgggactatccagatcttgtgtggcatgatggtattgagcttggggatcattttggcatctgcttccttctctccaaattttacccaagtgacttctacactgttgaactctgcttacccattcataggaccctttttttttatcatctctggctctctatcaatcgccacagagaaaaggttgaccaagcttttggtgcatagcagcctggttggaagcattctgagtgctctgtctgccctggtgggtttcattatcctgtctgtcaaacaggccaccttaaatcctgcctcactgcagtgtgagttggacaaaaataatataccaacaagaagttatgtttcttacttttatcatgattcactttataccacggactgctatacagccaaagccagtctggctggatccctctctctgatgctgatttgcactctgctggaattctgcctagctgtgctcactgctgtgctgcggtggaaacaggcttactctgacttccctgggagtgtacttttcctgcctcacagttacattggtaattctggcatgtcctcaaaaatgactcatgactgtggatatgaagaactattgacttcttaagaaaaaagggagaaatattaatcagaaagttgattcttatgataatatggaaaagttaaccattatagaaaagcaaagcttgagtttcctaaatgtaagcttttaaagtaatgaacattaaaaaaaaccattatttcactgtcatttaagatatgtgttcattggggatctcttgatttgcctgacattgacttcagcaaaagcacggggctgtaaattaccatttactagattagccaaatagtctgaatttccagaaaacaaggcagaatgatcattcccagaaacatttcccagaaaatgtttcccagaaaactagacagaatgatcattcaatggatcacagtgaagcaaaggacacaactttttattgtaccccttaattgtcaacaggagttaactgatttgttgtggtgctcagacttttttatacaggtgctagtgttttatcctatgtattttaactcattagtgcataaaggcaagccccatataatgaagtctcagggtatatgaaagtagctggcttcaaaataaaatttttgagtgcaaaaaaaaaaaaaaaaaaaaaaaaaaaaa

SEQ ID NO: 105 - DNA, 1200 bp, Homo sapiens
atggccgagctgctgcggagcctgcaggattcccagctcgtcgcccgcttccagcgccgctgcgggctcttccccgctccggatgaaggcccccgggagaacggcgcggaccccacggagcgcgcggcgcgggtccccggggtcgagcatctccccgcagccaacggcaagggcggcgaggctccggccaacgggctgcgcagagccgcggcgccggaggcttatgtacagaagtacgtcgtgaagaattatttctactattacctattccaattttcagctgctttgggccaagaagtgttctacatcacgtttcttccattcactcactggaatattgacccttatttatccagaagattgatcatcatatgggttttggtgatgtatattggccaagtggccaaggatgtcttgaagtggccccgtccctcctcccctccagttgtaaaactggaaaagagactgatcgctgaatatggaatgccatccacccacgccatggcggccactgccattgccttcaccctccttatctctactatggacagataccagtatccatttgtgttgggactggtgatggccgtggtgttttccaccttggtgtgtctcagcaggctctacactgggatgcatacggtcctggatgtgctgggtggcgtcctgatcaccgcactcctcatcgtcctcacctaccctgcctggaccttcatcgactgcctggactcggccagccccctcttccccgtgtgtgtcatagttgtgccattcttcctgtgttacaattaccctgtttctgattactacagcccaacccgggcggacaccaccaccattctggctgccggggctggagtgaccataggattctggatcaaccatttcttccagcttgtatccaagcccgctgaatctctccctgttattcagaacatcccaccactcaccacctacatgttagttttgggtctgaccaaatttgcagtgggaattgtgttgatcctcttggttcgtcagcttgtacaaaatctctcactgcaagtattatactcatggttcaaggtggtcaccaggaacaaggaggccaggcggagactggagattgaagtgccttacaagtttgttacctacacatctgttggcatctgcgctacaacctttgtgccgatgcttcacaggtttctgggattaccctga

SEQ ID NO: 106 - DNA, 2141 bp, Homo sapiens
ggctgaggagctgcccagagcaccgctcacactcccagagtacctgaagtcggcatttcaatgacaggtgacaagggtccccaaaggctaagcgggtccagctatggttccatctccagcccgaccagcccgaccagcccagggccacagcaagcacctcccagagagacctacctgagtgagaagatccccatcccagacacaaaaccgggcaccttcagcctgcggaagctatgggccttcacggggcctggctttctcatgagcattgctttcctggacccaggaaacatcgagtcagatcttcaggctggcgccgtggcgggattcaaacttctctgggtgctgctctgggccaccgtgttgggcttgctctgccagcgactggctgcacgtctgggcgtggtgacaggcaaggacttgggcgaggtctgccatctctactaccctaagtcggagtctcgctccgtcgcccagtcaggagtgcaatggtgcgatgtcagctcactgcaacctctacctcccaggtgccccgcaccgtcctctggctgaccatcgagctagccattgtgggctccgacatgcaggaagtcatcggcacggccattgcattcaatctgctctcagctggacgaatcccactctggggtggcgtcctcatcaccatcgtggacaccttcttcttcctcttcctcgataactacgggctgcggaagctggaagctttttttggactccttataaccattatggccttgacctttggctatgagtatgtggtggcgcgtcctgagcagggagcgcttcttcggggcctgttcctgccctcgtgcccgggctgcggccaccccgagctgctgcaggcggtgggcattgttggcgccatcatcatgccccacaacatctacctgcactcggccctggtcaagtctcgagagatagaccgggcccgccgagcggacatcagagaagccaacatgtacttcctgattgaggccaccatcgccctgtccgtctcctttatcatcaacctctttgtcatggctgtctttgggcaggccttctaccagaaaaccaaccaggctgcgttcaacatctgtgccaacagcagcctccacgactacgccaagatcttccccatgaacaacgccaccgtggccgtggacatttaccaggggggcgtgatcctgggctgcctgttcggccccgcggccctctacatctgggccataggtctcctggcggctgggcagagctccaccatgacgggcacctacgcgggacagttcgtgatggagggcttcctgaggctgcggtggtcacgcttcgcccgtgtcctcctcacccgctcctgcgccatcctgcccaccgtgctcgtggctgtcttccgggacctgagggacttgtcgggcctcaatgatctgctcaacgtgctgcagagcctgctgctcccgttcgccgtgctgcccatcctcacgttcaccagcatgcccaccctcatgcaggagtttgccaatggcctgctgaacaaggtcgtcacctcttccatcatggtgctagtctgcgccatcaacctctacttcgtggtcagctatctgcccagcctgccccaccctgcctacttcggccttgcagccttgctggccgcagcctacctgggcctcagcacctacctggtctggacctgttgccttgcccacggagccacctttctggcccacagctcccaccaccacttcctgtatgggctccttgaagaggaccagaaaggggagacctctggctaggcccacaccagggcctggctgggagtggcatgtatgacgtgactggcctgctggatgtggagggggcgcgtgcaggcagcaggatggagtgggacagttcctgagaccagccaacctgggggctttagggacctgctgtttcctagcgcagccatgtgattaccctctgggtctcagtgtcctcatctgtaaaatggagacaccaccacccttgccatggaggttaagcactttaacacagtgtctggcacttgggacaaaaacaaacaaacaaacaaaaaacaaaaaaaaaaaaaaaaaaaaaaaaaaaaaaaaaaaaaaaaaaaaaaaaaaaaaaaaaaaaaaaaaaaaaaa

SEQ ID NO: 107 - DNA, 2730 bp, Homo sapiens
ggggcgagcgggaaagcggcagcggcggcggcggcggcggcggcgggggaaggatgcaggggaagaagccgggcggttcgtcgggcggcggccggagcggcgagctgcagggggacgaggcgcagaggaacaagaaaaagaaaaagaaggtgtcctgcttttccaacatcaagatcttccttgtgtccgagtgcgccctgatgctggcgcagggcacggtgggcgcctacctggtgagcgtcctgaccaccctggagcgtaggttcaacctgcagagcgctgacgtgggtgtgatcgctagcagcttcgagatcgggaacctggcgctcatcctcttcgtgagctacttcggggcacgcgggcaccggccgcgcctgatcggctgcggcggcatcgtcatggcgctgggcgcgctgctgtcggcgctgcccgagttcctgacccaccagtacaagtacgaggcgggcgagatccgctggggcgccgagggccgcgacgtctgcgcagccaacggctcgggcggcgacgaggggcccgaccccgacctcatctgcctcaaccggacggctaccaacatgatgtacttgctgctcattggggcccaggtgctcctgggcatcggtgctacccctgtgcagcccctgggcgtctcctacatcgacgaccacgtgcggaggaaggactcctcgctctatataggaatcctgttcacgatgctggtatttggaccagcctgcgggtttatcctgggctctttctgtaccaaaatctacgtggatgcagtcttcattgacacaagtaacctggacatcactccggacgacccccgctggatcggagcctggtggggtggctttctgctctgcggtgccttactcttcttctcttccctcttgatgtttgggtttccacagtccctgcccccgcactcagaccccgccatggaaagcgagcaggccatgctctccgaaagagaatacgagagacccaagcccagcaacggggtcctgaggcaccccctggagccagacagcagtgcctcctgtttccagcagctgagagtgatcccgaaggtcaccaagcacctgctctcaaaccctgtgttcacctgcatcatcctggccgcctgcatggagattgcagtggtggctggcttcgctgcctttttggggaagtacctggagcagcagtttaacctcaccacctcttctgccaaccagctgcttgggatgactgcgatcccgtgtgcttgtctgggtatcttcctgggaggtcttttggtgaagaagctcagcctgtctgccctgggggccattcggatggccatgctcgtcaacctggtgtccactgcttgctacgtctccttcctcttcctgggctgcgacactggccctgtggctggggttactgttccctatggaaacagcacagcacctggctcagccctggacccctactcgccctgcaataataactgtgaatgccaaaccgattccttcactccagtgtgtggggcagatggcatcacctacctgtctgcctgctttgctggctgcaacagcacgaatctcacgggctgtgcgtgcctcaccaccgtccctgctgagaacgcaaccgtggttcctggaaaatgccccagtcctgggtgccaagaggccttcctcactttcctctgtgtgatgtgtatctgcagcctgatcggtgccatggcacagacaccctcagtcatcatcctcatcaggacagtcagccctgaactcaagtcttacgctttgggagttctttttctcctccttcgtttgttgggcttcatccctccacccctcatcttcggggctggcatcgactccacctgcctgttctggagcacgttctgtggggagcaaggcgcctgcgtcctctacgacaatgtggtctaccgatacctgtatgtcagcatcgccatcgcgctcaaatccttcgccttcatcctgtacaccaccacgtggcagtgcctgaggaaaaactataaacgctacatcaaaaaccacgagggcgggctgagcaccagcacagagtaccaagacattgagactgagaaaacctgccccgaatcacattcaccttcagaagactcctttgtgagaagctgagggcctggccctcttcctcttcctggagagaacagccctccaccacccacagacctcgcgggcctcacttagcgtgctcctccctgtccgagaacccgagggtccccatgtggattatccagccagtgtgtggtcctttgaggccccaagcgcaggcctgtgatgaggaccaaagaggtgacttatggtcaggagtactccaaacagctctcagagtaggcatctttcctgggtctctaaagagtcatgctgacctggtgtgcaaattcccttccacccatccctctacctcctctggggatggcttgccgacatgctttagaaactcccctcttgggaatgctcctctgactgagggctccaacagctttaatgaaatcagccgagagggtaaaaaccaacctgttgcatagaatggaggggggaaaaagcacatactcaatagatttttgagtgtggtactctgtatttttgcagcgtttattttccaaatgagcagtttagaaatatgtgatgtaaagtacatactgtacgtttgctgaaaattatattaaaagcactattttaattcttaaaaaaaaaaaaaaaaaaaaaaaaa

SEQ ID NO: 108 - DNA, 2031 bp, Homo sapiens
gagcgcgcgcgccgccgccgttgccgccgggctgagagaagagcttgcggggtttgcggttgatggccccgactgaagggctggaggcggtgtatgccgctgttcttgctgtcgctcccgacacctccgtccgcttctggtcatgagaggagacagaggcctgaagcaaagacatctgggtcagagaaaaagtatttaagggccatgcaagccaatcgtagccaactgcacagtcctccaggaactggaagcagtgaggatgcctcaacccctcagtgtgtccacacaagattgacaggagagggttcttgccctcattctggagatgttcatatccagataaactccatacctaaagaatgtgcagaaaatgcaagctccagaaatataaggtcaggtgtccatagctgtgcccatggatgtgtacacagtcgcttacggggtcactcccacagtgaagcaaggctgactgatgatactgccgcagaatctggagatcatggtagtagctccttctcagaattccgctatctcttcaagtggctgcaaaaaagtcttccatatattttgattctgagcgtcaaacttgttatgcagcatataacaggaatttctcttggaattgggctgctaacaacttttatgtatgcaaacaaaagcattgtaaatcaggtttttctaagagaaaggtcctcaaagattcagtgtgcttggttactggtattcttagcaggatcttctgttcttttatattacacctttcattctcagtcactttattacagcttaatttttttaaatcctactttggaccatttgagcttctgggaagtattttggattgttggaattacagacttcattctgaaattctttttcatgggcttaaaatgccttattttattggtgccttctttcatcatgccttttaaatctaagggttactggtatatgcttttagaagaattgtgtcaatactaccgaacttttgttcccataccagtttggtttcgctaccttataagctatggggagtttggtaacgtaactagatggagtcttgggatactgctggctttactctacctcatattaaaacttttggaattttttgggcatctgagaactttcagacaggttttacgaatattttttacacaaccaagttatggagtggctgccagcaagagacagtgttcagatgtggatgatatttgttcaatatgtcaagctgaatttcagaagccaattcttctcatttgtcagcatatattttgtgaagagtgcatgaccttatggtttaacagagagaaaacatgtccactctgcagaactgtgatttcagaccatataaacaaatggaaggatggagccacttcatcacaccttcaaatatattaagttgtataaactatcaaggccacaaaatactaatgtcatttggtcataatgactactgataaggcatcagaatggattttcagggctaccagaaaaatgtttccagatggttttagaatgtaggacttatgatccaattcaccaaaagattaaatgaaaccaccctgtgttttaaaatatatataatgttcaacctaatgtatatgcaacatttattctattctaattatttgacaggtaactgcagtgttaaattgtaaatgtgttttctttatgttaccaaaacagcaatttgaaattagaactagtggttttagagaactcaggtattctttcctgacattgttttcagaataaagaatatttttcataatattttaagatacatactatctaaaagtagaattttgttcagcattgacttttataattcccatcctaaaaattcttaatattttcataaaatttgtatttttaaatgaaaattctaaatgttgtattttatcagtaacattttctaagtgaagattaatttactgaggatgatacattatagtattgtattattctctgtagtaagattagtaataagtgaaaataaatgatttaaattcaaaaaaaaaaaaaaaa

SEQ ID NO: 109 - DNA, 1721 bp, Homo sapiens
gggttccaaatctcacaagcctctttgtatgtgatgctctcgcagtgaagaagattctttgggctataaagatgaagagtctacttcttctggtgctgatttcaatctgctgggctgatcatctttcagacaactatactctggatcatgacagagctattcacatccaagcagaaaatggcccccatctacttgtggaagcagagcaagccaaggtgttttcacacagaggtggcaatgttacactgccatgtaaattttatcgagaccctacagcatttggctcaggaatccataaaatccgaattaagtggaccaagctaacttcggattacctcaaggaagtggatgtttttgtttccatgggataccacaaaaaaacctatggaggctaccagggtagagtgtttctgaagggaggcagtgatagtgatgcttctctggtcatcacagacctcactctggaagattatgggagatataagtgtgaggtgattgaaggattagaagatgatactgttgtggtagcactggacttacaaggtgtggtattcccttactttccacgactggggcgctacaatctcaattttcacgaggcgcagcaggcgtgtctggaccaggatgctgtgatcgcctccttcgaccagctgtacgacgcctggcggggcgggctggactggtgcaatgccggctggctcagtgatggctctgtgcaatatcccatcacaaagcccagagagccctgtgggggccagaacacagtgcccggagtcaggaactacggattttgggataaagataaaagcagatatgatgttttctgttttacatccaatttcaatggccgtttttactatctgatccaccccaccaaactgacctatgatgtagcggtgcaagcttgtctcaatgatggtgctcagattgcaaaagtgggccagatatttgctgcctggaaaattctcggatatgaccgctgtgatgcgggctggttggcggatggcagcgtccgctaccccatctctaggccaagaaggcgctgcagtcctactgaggctgcagtgcgcttcgtgggtttcccagataaaaagcataagctgtatggtgtctactgcttcagagcatacaactgaatgtgcccttagagcgcatcagttttaaagtcattaagaacatgtgaaaggtgttttttttttccaatatgaactcatgcaagttaccaaaactgtgataacccttttttacttactgtaaagagtcattttcataaagatcaattcattgatttgttttttgtaaagctatcattcaatatatattataaattaatataaatttaagggaagctctatgtaaggagacttagagccaaactgtttaagctgtatcatcccaacaaagtatcctttcatgaacggggcatgcaatagcttaagaattgctaggattaaattaaggaaagtaaagctactcagagcagcaggttccacaagcacaaactttacacatttgtacaattttgaaatgcactacaataaacaaattagagcaacacatttgaaatacaggcttctttacataaactgagaggttatacaaaactcagtttcacaagggaacaatctatacctttctaaaagttaatatttcaagtctctaataggcagaatattttactctttaaaatcctgcctttctgaccgaaaaaaaaaaaaaaa

SEQ ID NO: 110 - DNA, 9645 bp, Homo sapiens; identical to SEQ ID NO: 2

SEQ ID NO: 111 - DNA, 3070 bp, Homo sapiens
gagcccagagccagagagcgcgctgggcggtgctgggcacccgcggagtggaacggggctggtggaatgcacagggtcgcagcgcttgggccaccctcggtcagagggcgccgtgtccagcgagcaaacgggcgccccggagccttgctgagaggcagctctgggctttcccagctccgaagtcaatactgagatcccagatgtgtccagagacatcctgaagaggctcgggggtggaggagccttagtgtgtccacaaagggactcctgaaactgactgagagccagtggatttgccagcagtctgagcttctaccgagtcttcccccacctcaatccctgttgctatggagactaccaatggaacggagacctggtatgagagcctgcatgccgtgctgaaggctctaaatgccactcttcacagcaatttgctctgccggccagggccagggctggggccagacaaccagactgaagagaggcgggccagcctacctggccgtgatgacaactcctacatgtacattctctttgtcatgtttctatttgctgtaactgtgggcagcctcatcctgggatacacccgctcccgcaaagtggacaagcgtagtgacccctatcatgtgtatatcaagaaccgtgtgtctatgatctaacacgagagggctgggacggtggaagaccaagacacctggggattgcgtctggggcctccagaactctgctgtggactgcatcaggtctcagtgtccctatctgtaagatcaacaagaaacacggttaagggaggtcgtcactggggtgggagaagaggggctggtagaccgaagccttgtgcataaggattttttcccaggaaaagatagactttataaacagtgggagcccatgaacaaacatataaaagtagcaacagataatgaccaataactggttcagtggctggagtattaggggcctggggattggagaacggagaagaagttgtagcagagggaaatgagacaggaagatgctctggggacacattttttatgtgttatcttcagccatgagaagcagtgatgactatcccatatcacagatatgatttaccaccaccaccctgcccccgctcccgtgaagaaagcagggcaagtgctgtgctgcccatttgggcctgcatagtgccatgattggaacccaggaactctggtctccttgcctagtgcttttcaaaactctgtgctacacaggagtggatccaggcctgaaggtcatacaattctggggactctctttaagaaaaagaattctaaaatatcttacttttgcaaacattatgaaaatatactgccacattaatatgttgctagggcccctgctaggaccttaagaaggagctcatgtgagtcaggaccctgaatgttaggcctcgttagctctatggttcatatgcttcttgaaccaagtcacagggcacttcccagccacattgccaggcaacaggactaaactacctccaaagcaagcagtcttttcagttttgactgagtgatgtgagaaacttcttttcttttcttttctttttttttttttgagacagtctccctatgtcacccaggctgtggtgcagcaacccaatcttggctcactgcaacccccacctcccgggttcaagcaattatcctgcctcagccacctgagtagctgggattacaggttcctgtcaccacacccagttaatttatatatatatatatatatatatatttaagtagagacagggtttcacatgttgcccaggctggtctcgaactcctgtcctcaagttatctgcccattttggtctcccaaagtgctgggattacaagtgtaagccaccacgactatctgagagaagttttctgatgtcatgttgaatctgcttctaaaagactgatactgccaaggtgggcggatcacctgaggtcaggagttcgagaccagcctggccaacatggtgaaaccccatctactaaaaaaatacaaaaattagccagacctggtggcgggtgcccgtattcccagctacttgggaggctgaggcaggagaattgtttgaacccgggaggtggaggttgcagtaagccaagatcacgccactgcactccagcctgggtgacagagcaaggctctgtctcaaaaaaaaacaaaaacaaaaacaaaaaagactgatatcgcacctaaattattattatattaaaagaagcagagtatgagagacaggtacatggtccagtaggaagagaagcagccctgattctaccacttaaggtgatgtatgatcttaggctggacacttctctccctcatccgttttcctcttcaacataatgaaatagacttgaaagtctctaaggctctatcagttctgacattctaggcttcatatacattaagttgagccatatgtaatcactgtgtttgtaggttagaaacagctgagtatcgtagtttcatatatggttccagctaatacatgcaatgtggctggtgaacacttctgaattcagaaactatcccagatctcagctagaaccatccactgttctgtttgtccagtttcaacttaagggatctccatgcggtccctggaagtacccattgaaacatgcgtatttgtgtatagcagaactctgaaataatattctgacagcagttatctctgaggaattgggttataggtgattttccctttccgcatgataaatttatgtaatatttgactgacttgaccgtaagtatgttacttgtataataaaaggaaaaaaggtacttctattttgaaaaaataaaaataaaagcctttgggttcttgaatggaggatcatggaacacatttgctgccatatgcagttatgttgatgctctgcaaacctgtgctgagccctgttgctcaagcccttcctcatctcttcttgagggagaaggtggagacttccttaaggagatgtgacatatgggaagacaacagattcagaaatttacgtggataggactttagacaccacccagcccaaacttccaaataaaatatggaacgcaa

SEQ ID NO: 112 - DNA, 2181 bp, Homo sapiens
gcgcggcggagctggaactgctgcagctgctgccgccgccggaggaaccttgatccccgtgctccggacaccccgggcctcgccatggctgaccagctgactgaggagcagattgcagagttcaaggaggccttctccctctttgacaaggatggagatggcactatcaccaccaaggagttggggacagtgatgagatccctgggacagaaccccactgaagcagagctgcaggatatgatcaatgaggtggatgcagatgggaacgggaccattgacttcccggagttcctgaccatgatggccagaaagatgaaggacacagacagtgaggaggagatccgagaggcgttccgtgtctttgacaaggatgggaatggctacatcagcgccgcagagctgcgtcacgtaatgacgaacctgggggagaagctgaccgatgaggaggtggatgagatgatcagggaggctgacatcgatggagatggccaggtcaattatgaagagtttgtacagatgatgactgcaaagtgaaggccccccgggcagctggcgatgcccgttctcttgatctctctcttctcgcgcgcgcactctctcttcaacactcccctgcgtaccccggttctagcaaacaccaattgattgactgagaatctgataaagcaacaaaagatttgtcccaagctgcatgattgctctttctccttcttccctgagtctctctccatgcccctcatctcttccttttgccctcgcctcttccatccatgtcttccaaggcctgatgcattcataagttgaagccctccccagatccccttggggagcctctgccctcctccagcccggatggctctcctccattttggtttgtttcctcttgtttgtcatcttattttgggtgctggggtggctgccagccctgtcccgggacctgctgggagggacaagaggccctcccccaggcagaagagcatgccctttgccgttgcatgcaaccagccctgtgattccacgtgcagatcccagcagcctgttggggcaggggtgccaagagaggcattccagaaggactgagggggcgttgaggaattgtggcgttgactggatgtggcccaggagggggtcgagggggccaactcacagaaggggactgacagtgggcaacactcacatcccactggctgctgttctgaaaccatctgattggctttctgaggtttggctgggtggggactgctcatttggccactctgcagattggacttgcccgcgttcctgaagcgctctcgagctgttctgtaaatacctggtgctaacatcccatgccgctccctcctcacgatgcacccaccgccctgagggcccgtcctaggaatggatgtggggatggtcgctttgtaatgtgctggttctctttttttttctttcccctctatggcccttaagactttcattttgttcagaaccatgctgggctagctaaagggtggggagagggaagatgggccccaccacgctctcaagagaacgcacctgcaataaaacagtcttgtcggccagctgcccaggggacggcagctacagcagcctctgcgtcctggtccgccagcacctcccgcttctccgtggtgacttggcgccgcttcctcacatctgtgctccgtgccctcttccctgcctcttccctcgcccacctgcctgcccccatactcccccagcggagagcatgatccgtgcccttgcttctgactttcgcctctgggacaagtaagtcaatgtgggcagttcagtcgtctgggttttttccccttttctgttcatttcatctggctccccccaccacctccccaccccaccccccaccccctgcttcccctcactgcccaggtcgatcaagtggcttttcctgggacctgcccagctttgagaatctcttctcatccaccctctggcacccagcctctgagggaaggagggatggggcatagtgggagacccagccaagagctgagggtaaggtcaggtaggcgtgaggctgtggacattttcggaatgttttggttttgttttttttaaaccgggcaatattgtgttcagttcaagctgtgaagaaaaatatatatcaatgttttccaataaaatacagtgactacctgaaaaaaaaaaaaaaaaaaa

SEQ ID NO: 113 - DNA, 1204 bp, Homo sapiens
agcagaagaaccctcttggactggacgatttgggaattcaaaacttgggacaaactgtcagccttgcccctgctgtggaggcagcctcaatgctgaaaatggagcctctgaacagcacgcaccccggcaccgccgcctccagcagccccctggagtcccgtgcggccggtggcggcagcggcaatggcaacgagtacttctacattctggttgtcatgtccttctacggcattttcttgatcggaatcatgctgggctacatgaaatccaagaggcgggagaagaagtccagcctcctgctgctgtacaaagacgaggagcggctctggggggaggccatgaagccgctgcccgtggtgtcgggcctgaggtcggtgcaggtgcccctgatgctgaacatgctgcaggagagcgtggcgcccgcgctgtcctgcaccctctgttccatggaaggggacagcgtgagctccgagtcctcctccccggacgtgcacctcaccattcaggaggagggggcagacgaggagctggaggagacctcggagacgcccctcaacgagagcagcgaagggtcctcggagaacatccatcagaattcctagcacccccgggacccctgcgggtggctccatcagccagcaaccttagagagaggaaagacagttttcaagtgtctggtttcactttcacagtgcggctgccactttgaagagacccttggtaaacccctgattcggggtggggtgggggactaggctcagccggaaccagcacctccaaggagtccgggaggtgcctgtggtttgcacccaccactgaaaaagccgcggagatgcgcagcgcgtacactgactttggggcctgggtgttggggttctgatcagaatttggcgggatgatatgcttgccattttctcactggatgccctgggtagctcctgcagggtctgcctgttcccagggctgccgaatgcttaggacacgctgagagactagttgtgatttgctattttgcctagagctttgtccttctagatctgattggctgtaagtatctctactgtgtacctgtggcattccttcacagtgggttacaagcttcttttggattagagggggatttttgatgggagaaagctggagatctgaacccagcccatttgcacactaaaaaaaaaaaaaaaaaaaaaaaaaaaaaaaaaaa

SEQ ID NO: 114 - DNA, 1652 bp, Homo sapiens
agcagctgcagtcggaaaaatcagagaaagcgtcacccagccccagattccgaggggcctgccagggactctctcctcctgctccttggaaaggaagaccccgaaagacccccaagccaccggctcagacctgcttctgggctgccatgggacttgcggccaccgccccccggctgtcctccacgctgccgggcagataagggcagctgctgcccttggggcacctgctcactcccgcagcccagccactcctccagggccagcccttccctgactgagtgaccacctctgctgccccgaggccatgtaggccgtgcttaggcctctgtggacacactgctggggacggcgcctgagctctcagggggacgaggaacaccaccatgccccggggcttcacctggctgcgctatcttgggatcttccttggcgtggccttggggaatgagcctttggagatgtggcccttgacgcagaatgaggagtgcactgtcacgggttttctgcgggacaagctgcagtacaggagccgacttcagtacatgaaacactacttccccatcaactacaagatcagtgtgccttacgagggggtgttcagaatcgccaacgtcaccaggctgcagagggcccaggtgagcgagcgggagctgcggtatctgtgggtcttggtgagcctcagtgccactgagtcggtgcaggacgtgctgctcgagggccacccatcctggaagtacctgcaggaggtgcagacgctgctgctgaatgtccagcagggcctcacggatgtggaggtcagccccaaggtggaatccgtgttgtccctcttgaatgccccagggccaaacctgaagctggtgcggcccaaagccctgctggacaactgcttccgggtcatggagctgctgtactgctcctgctgtaaacaaagctccgtcctaaactggcaggactgtgaggtgccaagtcctcagtcttgcagcccagagccctcattgcagtatgcggccacccagctgtaccctccgcccccgtggtcccccagctccccgcctcactccacgggctcggtgaggccggtcagggcacagggcgagggcctcttgccctgagcaccctggatggtgactgcggataggggcagccagaccagctcccacaggagttcaactgggtctgagacttcaaggggtggtggtgggagccccccttgggagaggacccctgggaagggtgtttttcctttgagggggattctgtgccacagcagggctcagcttcctgccttccatagctgtcatggcctcacctggagcggaggggacctggggacctgaaggtggatggggacacagctcctggcttctcctggtgctgccctcactgtccccccgcctaaagggggtactgagcctcctgtggcccgcagcagtgagggcacagctgtgggttgcaggggagacagccagcacggcgtggccattctatgaccccccagcctggcagactggggagctgggggcagagggcggtgccaagtgccacatcttgccatagtggatgctcttccagtttcttttttctattaaacaccccacttcctttgaaaaaaaaaaaaaaaaaaaaaaaaaaaaaaaaaaaaaaaaaaaaaa

SEQ ID NO: 115 - DNA, 1182 bp, Homo sapiens
acctctcaagcagccagcgcctgcctgaatctgttctgccccctccccacccatttcaccaccaccatgacaccgggcacccagtctcctttcttcctgctgctgctcctcacagtgcttacagctaccacagcccctaaacccgcaacagttgttacgggttctggtcatgcaagctctaccccaggtggagaaaaggagacttcggctacccagagaagttcagtgcccagctctactgagaagaatgcttttaattcctctctggaagatcccagcaccgactactaccaagagctgcagagagacatttctgaaatgtttttgcagatttataaacaagggggttttctgggcctctccaatattaagttcaggccaggatctgtggtggtacaattgactctggccttccgagaaggtaccatcaatgtccacgacgtggagacacagttcaatcagtataaaacggaagcagcctctcgatataacctgacgatctcagacgtcagcgtgagtgatgtgccatttcctttctctgcccagtctggggctggggtgccaggctggggcatcgcgctgctggtgctggtctgtgttctggttgcgctggccattgtctatctcattgccttggctgtctgtcagtgccgccgaaagaactacgggcagctggacatctttccagcccgggatacctaccatcctatgagcgagtaccccacctaccacacccatgggcgctatgtgccccctagcagtaccgatcgtagcccctatgagaaggtttctgcaggtaatggtggcagcagcctctcttacacaaacccagcagtggcagccacttctgccaacttgtaggggcacgtcgcccgctgagctgagtggccagccagtgccattccactccactcaggttcttcagggccagagcccctgcaccctgtttgggctggtgagctgggagttcaggtgggctgctcacagcctccttcagaggccccaccaatttctcggacacttctcagtgtgtggaagctcatgtgggcccctgagggctcatgcctgggaagtgttgtggtgggggctcccaggaggactggcccagagagccctgagatagcggggatcctgaactggactgaataaaacgtggtctcccactgcgccaaaaaaaaaaaa

SEQ ID NO: 116 - DNA, 3309 bp, Homo sapiens
ttcagcccctctcccgggctgcgcctccgcactccgggcccgggcagaagggggtgcgcctcggccccaccacccagggagcagccgagctgaaaggccgggaaccgcggcttgcggggaccacagctcccgaaagcgacgttcggccaccggaggagcgggagccaagcaggcggagctcggcgggagaggtgcgggccgaatccgagccgagcggagaggaatccggcagtagagagcggactccagccggcggaccctgcagccctcgcctgggacagcggcgcgctgggcaggcgcccaagagagcatcgagcagcggaacccgcgaagccggcccgcagccgcgacccgcgcagcctgccgctctcccgccgccggtccgggcagcatgaggcgcgcggcgctctggctctggctgtgcgcgctggcgctgagcctgcagccggccctgccgcaaattgtggctactaatttgccccctgaagatcaagatggctctggggatgactctgacaacttctccggctcaggtgcaggtgctttgcaagatatcaccttgtcacagcagaccccctccacttggaaggacacgcagctcctgacggctattcccacgtctccagaacccaccggcctggaggctacagctgcctccacctccaccctgccggctggagaggggcccaaggagggagaggctgtagtcctgccagaagtggagcctggcctcaccgcccgggagcaggaggccaccccccgacccagggagaccacacagctcccgaccactcatcaggcctcaacgaccacagccaccacggcccaggagcccgccacctcccacccccacagggacatgcagcctggccaccatgagacctcaacccctgcaggacccagccaagctgaccttcacactccccacacagaggatggaggtccttctgccaccgagagggctgctgaggatggagcctccagtcagctcccagcagcagagggctctggggagcaggacttcacctttgaaacctcgggggagaatacggctgtagtggccgtggagcctgaccgccggaaccagtccccagtggatcagggggccacgggggcctcacagggcctcctggacaggaaagaggtgctgggaggggtcattgccggaggcctcgtggggctcatctttgctgtgtgcctggtgggtttcatgctgtaccgcatgaagaagaaggacgaaggcagctactccttggaggagccgaaacaagccaacggcggggcctaccagaagcccaccaaacaggaggaattctatgcctgacgcgggagccatgcgccccctccgccctgccactcactaggcccccacttgcctcttccttgaagaactgcaggccctggcctcccctgccaccaggccacctccccagcattccagcccctctggtcgctcctgcccacggagtcgtggggtgtgctgggagctccactctgcttctctgacttctgcctggagacttagggcaccaggggtttctcgcataggacctttccaccacagccagcacctggcatcgcaccattctgactcggtttctccaaactgaagcagcctctccccaggtccagctctggaggggagggggatccgactgctttggacctaaatggcctcatgtggctggaagatcctgcgggtggggcttggggctcacacacctgtagcacttactggtaggaccaagcatcttgggggggtggccgctgagtggcaggggacaggagtccactttgtttcgtggggaggtctaatctagatatcgacttgtttttgcacatgtttcctctagttctttgttcatagcccagtagaccttgttacttctgaggtaagttaagtaagttgattcggtatccccccatcttgcttccctaatctatggtcgggagacagcatcagggttaagaagactttttttttttttttttaaactaggagaaccaaatctggaagccaaaatgtaggcttagtttgtgtgttgtctcttgagtttgtcgctcatgtgtgcaacagggtatggactatctgtctggtggccccgtttctggtggtctgttggcaggctggccagtccaggctgccgtggggccgccgcctctttcaagcagtcgtgcctgtgtccatgcgctcagggccatgctgaggcctgggccgctgccacgttggagaagcccgtgtgagaagtgaatgctgggactcagccttcagacagagaggactgtagggagggcggcaggggcctggagatcctcctgcagaccacgcccgtcctgcctgtggcgccgtctccaggggctgcttcctcctggaaattgacgaggggtgtcttgggcagagctggctctgagcgcctccatccaaggccaggttctccgttagctcctgtggccccaccctgggccctgggctggaatcaggaatattttccaaagagtgatagtcttttgcttttggcaaaactctacttaatccaatgggtttttccctgtacagtagattttccaaatgtaataaactttaatataaagtagtcctgtgaatgccactgccttcgcttcttgcctctgtgctgtgtgtgacgtgaccggacttttctgcaaacaccaacatgttgggaaacttggctcgaatctctgtgccttcgtctttcccatggggagggattctggttccagggtccctctgtgtatttgcttttttgttttggctgaaattctcctggaggtcggtaggttcagccaaggttttataaggctgatgtcaatttctgtgttgccaagctccaagccccatcttctaaatggcaaaggaaggtggatggccccagcacagcttgacctgaggctgtggtcacagcggaggtgtggagccgaggcctaccccgcagacaccttggacatcctcctcccacccggctgcagaggccagaggcccccagcccagggctcctgcacttacttgcttatttgacaacgtttcagcgactccgttggccactccgagaggtgggccagtctgtggatcagagatgcaccaccaagccaagggaacctgtgtccggtattcgatactgcgactttctgcctggagtgtatgactgcacatgactcgggggtggggaaaggggtcggctgaccatgctcatctgctggtccgtgggacggtgcccaagccagaggctgggttcatttgtgtaacgacaataaacggtacttgtcatttcgggcaaaaaaaaaaaaaaaaaa

SEQ ID NO: 117 - DNA, 2450 bp, Homo sapiens
agaacggcttccggcgggagctgtgcagctccttatcatggggacaattcatctctttcgaaaaccacaaagatccttttttggcaagttgttacgggaatttagacttgtagcagctgaccgaaggtcctggaagatactgctctttggtgtaataaacttgatatgtactggcttcctgcttatgtggtgcagttctactaatagtatagctttaactgcctatacttacctgaccatttttgatctttttagtttaatgacatgtttaataagttactgggtaacattgaggaaacctagccctgtctattcatttgggtttgaaagattagaagtcctggctgtatttgcctccacagtcttggcacagttgggagctctctttatattaaaagaaagtgcagaacgctttttggaacagcccgagatacacacgggaagattattagttggtacttttgtggctctttgtttcaacctgttcacgatgctttctattcggaataaaccttttgcttatgtctcagaagctgctagtacgagctggcttcaagagcatgttgcagatcttagtcgaagcttgtgtggaattattccgggacttagcagtatcttccttccccgaatgaatccatttgttttgattgatcttgctggagcatttgctctttgtattacatatatgctcattgaaattaataattattttgccgtagacactgcctctgctatagctattgccttgatgacatttggcactatgtatcccatgagtgtgtacagtgggaaagtcttactccagacaacaccaccccatgttattggtcagttggacaaactcatcagagaggtatctaccttagatggagttttagaagtccgaaatgaacatttttggaccctaggttttggctcattggctggatcagtgcatgtaagaattcgacgagatgccaatgaacaaatggttcttgctcatgtgaccaacaggctgtacactctagtgtctactctaactgttcaaattttcaaggatgactggattaggcctgccttattgtctgggcctgttgcagccaatgtcctaaacttttcagatcatcacgtaatcccaatgcctcttttaaagggtactgatgatttgaacccagttacatcaactccagctaaacctagtagtccacctccagaattttcatttaacactcctgggaaaaatgtgaacccagttattcttctaaacacacaaacaaggccttatggttttggtctcaatcatggacacacaccttacagcagcatgcttaatcaaggacttggagttccaggaattggagcaactcaaggattgaggactggttttacaaatataccaagtagatatggaactaataatagaattggacaaccaagaccatgatagactctaacttatttttataaggaatattgactccttggcttccaatttatttagtaatccaactttgcattgactgtttaatcatttactctaaatgttagataatagtagtcttgttcacatttcatgaaacctatgaaactatatttttgtaaaatgtatttgtgacagtgaaatcctcgtaaatgttaaaggctttaaataggcttcctttagaaaatgtgtttctttaaatttggattttggtatctttggttttgtagttgactgcagtgtgatgtgaccttacctttataagagccacttgatggagtagatctgtcacattactaagatacgatatttctttttttttccgagacggagtcttgctctgccactgtgcccggccaatacattattattaacttaaggctgtactttattaaggcttccttagtttttgttttgttttgttttttgagatggagtctcactctgtcgcccaggctggaatgcagtggcatgatctcagctcactgcaacctctgcctcctgagttcaaatgattctcctgcctcagcctcccgagtagctgggattacaggcacctgccaccacgcccagctaatttttgtatttttagtaaagacgggggatttcaccatgttggccaggctggtcttgaactcctgacctcatgatccacccaccttagcctcccaaagtgctgggattaggtgtgagccaccgcacctggccgatattttctttaatgaaatttataaatatgcttcttgaataatacacattttgggaaagggaaaaatgtctgttcaaaaagtaaaggtctcttttatagcttttccaaacttaattgctaaatttttctttgaggttctcctgaattatgtcttacaaactaaaagcaaaaatttttagcagaaattttggaatacattctatctagcacaatttgaatttttaattatcaagatttttgttaaagtttctctcctttaaaaattttagtacatttgtaaat

SEQ ID NO: 118 - DNA, 3273 bp, Homo sapiens
cgctgggcctgcccggaatcccgccgcctgcgccccgcgccccgcgccctgcgggccatgggagccggccgccggcagggacgacgcctgtgagacccgcgagcggcctcggggaccatggggagcgatcgggcccgcaagggcggagggggcccgaaggacttcggcgcgggactcaagtacaactcccggcacgagaaagtgaatggcttggaggaaggcgtggagttcctgccagtcaacaacgtcaagaaggtggaaaagcatggcccggggcgctgggtggtgctggcagccgtgctgatcggcctcctcttggtcttgctggggatcggcttcctggtgtggcatttgcagtaccgggacgtgcgtgtccagaaggtcttcaatggctacatgaggatcacaaatgagaattttgtggatgcctacgagaactccaactccactgagtttgtaagcctggccagcaaggtgaaggacgcgctgaagctgctgtacagcggagtcccattcctgggcccctaccacaaggagtcggctgtgacggccttcagcgagggcagcgtcatcgcctactactggtctgagttcagcatcccgcagcacctggtggaggaggccgagcgcgtcatggccgaggagcgcgtagtcatgctgcccccgcgggcgcgctccctgaagtcctttgtggtcacctcagtggtggctttccccacggactccaaaacagtacagaggacccaggacaacagctgcagctttggcctgcacgcccgcggtgtggagctgatgcgcttcaccacgcccggcttccctgacagcccctaccccgctcatgcccgctgccagtgggccctgcggggggacgccgactcagtgctgagcctcaccttccgcagctttgaccttgcgtcctgcgacgagcgcggcagcgacctggtgacggtgtacaacaccctgagccccatggagccccacgccctggtgcagttgtgtggcacctaccctccctcctacaacctgaccttccactcctcccagaacgtcctgctcatcacactgataaccaacactgagcggcggcatcccggctttgaggccaccttcttccagctgcctaggatgagcagctgtggaggccgcttacgtaaagcccaggggacattcaacagcccctactacccaggccactacccacccaacattgactgcacatggaacattgaggtgcccaacaaccagcatgtgaaggtgcgcttcaaattcttctacctgctggagcccggcgtgcctgcgggcacctgccccaaggactacgtggagatcaatggggagaaatactgcggagagaggtcccagttcgtcgtcaccagcaacagcaacaagatcacagttcgcttccactcagatcagtcctacaccgacaccggcttcttagctgaatacctctcctacgactccagtgacccatgcccggggcagttcacgtgccgcacggggcggtgtatccggaaggagctgcgctgtgatggctgggccgactgcaccgaccacagcgatgagctcaactgcagttgcgacgccggccaccagttcacgtgcaagaacaagttctgcaagcccctcttctgggtctgcgacagtgtgaacgactgcggagacaacagcgacgagcaggggtgcagttgtccggcccagaccttcaggtgttccaatgggaagtgcctctcgaaaagccagcagtgcaatgggaaggacgactgtggggacggctccgacgaggcctcctgccccaaggtgaacgtcgtcacttgtaccaaacacacctaccgctgcctcaatgggctctgcttgagcaagggcaaccctgagtgtgacgggaaggaggactgtagcgacggctcagatgagaaggactgcgactgtgggctgcggtcattcacgagacaggctcgtgttgttgggggcacggatgcggatgagggcgagtggccctggcaggtaagcctgcatgctctgggccagggccacatctgcggtgcttccctcatctctcccaactggctggtctctgccgcacactgctacatcgatgacagaggattcaggtactcagaccccacgcagtggacggccttcctgggcttgcacgaccagagccagcgcagcgcccctggggtgcaggagcgcaggctcaagcgcatcatctcccaccccttcttcaatgacttcaccttcgactatgacatcgcgctgctggagctggagaaaccggcagagtacagctccatggtgcggcccatctgcctgccggacgcctcccatgtcttccctgccggcaaggccatctgggtcacgggctggggacacacccagtatggaggcactggcgcgctgatcctgcaaaagggtgagatccgcgtcatcaaccagaccacctgcgagaacctcctgccgcagcagatcacgccgcgcatgatgtgcgtgggcttcctcagcggcggcgtggactcctgccagggtgattccgggggacccctgtccagcgtggaggcggatgggcggatcttccaggccggtgtggtgagctggggagacggctgcgctcagaggaacaagccaggcgtgtacacaaggctccctctgtttcgggactggatcaaagagaacactggggtataggggccggggccacccaaatgtgtacacctgcggggccacccatcgtccaccccagtgtgcacgcctgcaggctggagactggaccgctgactgcaccagcgcccccagaacatacactgtgaactcaatctccagggctccaaatctgcctagaaaacctctcgcttcctcagcctccaaagtggagctgggaggtagaaggggaggacactggtggttctactgacccaactgggggcaaaggtttgaagacacagcctcccccgccagccccaagctgggccgaggcgcgtttgtgcatatctgcctcccctgtctctaaggagcagcgggaacggagcttcggggcctcctcagtgaaggtggtggggctgccggatctgggctgtggggcccttgggccacgctcttgaggaagcccaggctcggaggaccctggaaaacagacgggtctgagactgaaattgttttaccagctcccagggtggacttcagtgtgtgtatttgtgtaaatgagtaaaacattttatttctttttaaaaaaaaaaaaaaaaaaaaaaaaaaaaaaaaaaaaaaaaaaaaaaaaaa

SEQ ID NO: 119 - DNA, 1410 bp, Homo sapiens
gggcggggctcgggccggtccgcccgcgcgcaggtgagtgagccagggcggagcgcagctgcgccgggcttgggcgcctggggccgccgctccccaccgtcgttttccccaccgaggccgaggcgtcccggagtcatggccggcctgaactgcggggtctctatcgcactgctaggggttctgctgctgggtgcggcgcgcctgccgcgcggggcagaagcttttgagattgctctgccacgagaaagcaacattacagttctcataaagctggggaccccgactctgctggcaaaaccctgttacatcgtcatttctaaaagacatataaccatgttgtccatcaagtctggagaaagaatagtctttacctttagctgccagagtcctgagaatcactttgtcatagagatccagaaaaatattgactgtatgtcaggcccatgtccttttggggaggttcagcttcagccctcgacatcgttgttgcctaccctcaacagaactttcatctgggatgtcaaagctcataagagcatcggtttagagctgcagttttccatccctcgcctgaggcagatcggtccgggtgagagctgcccagacggagtcactcactccatcagcggccgaatcgatgccaccgtggtcaggatcggaaccttctgcagcaatggcactgtgtcccggatcaagatgcaagaaggagtgaaaatggccttacacctcccatggttccaccccagaaatgtctccggcttcagcattgcaaaccgctcatctataaaacgtctgtgcatcatcgagtctgtgtttgagggtgaaggctcagcaaccctgatgtctgccaactacccagaaggcttccctgaggatgagctcatgacgtggcagtttgtcgttcctgcacacctgcgggccagcgtctccttcctcaacttcaacctctccaactgtgagaggaaggaggagcgggttgaatactacatcccgggctccaccaccaaccccgaggtgttcaagctggaggacaagcagcctgggaacatggcggggaacttcaacctctctctgcaaggctgtgaccaagatgcccaaagtccagggatcctccggctgcagttccaagttttggtccaacatccacaaaatgaaagcagtgagtgagccccactttcctttttcttcctcctccagcaccttcgttgtttcctgggtagtctgcctgggtgaggctcccttcctgtttctcatctgtggcttctgaaacacttagactctggacccagcaagagtttcaggaagtgggttgctaggcagttagacaggcttgttggtgaacacccggtatgtagttccatttcagcacaataaaaagaaatcttgcattcaaaaaaaaaaaaaaaaaaa

SEQ ID NO: 120 - DNA, 1098 bp, Homo sapiens
ggctggcggccggcgggagaggcggccggcctggactggcccgagagggatcccggttcccagaacagacctaggaggcggcctcgagggcggacggcagggagggccagcatgccccgactgctgcaccccgccctgccgctgctcctgggcgccacgctgaccttccgggcgctccggcgcgcgctctgtcgcctgcccctacccgtgcacgtgcgcgccgaccccctgcgcacctggcgctggcacaacctgctcgtctccttcgctcactccattgtgtcggggatctgggcactgctgtgtgtatggcagactcctgacatgttagtggagattgagacggcgtggtcactttctggctatttgctcgtttgcttctctgcggggtatttcatccacgatacggtggacatcgtggctagcggacagacgcgagcctcttgggaataccttgtccatcacgtcatggccatgggtgccttcttctccggcatcttttggagcagctttgtcggtgggggtgtcttaacactactggtggaagtcagcaacatcttcctcaccattcgcatgatgatgaaaatcagtaatgcccaggatcatctcctctaccgggttaacaagtatgtgaacctggtcatgtactttctcttccgcctggcccctcaggcctacctcacccatttcttcttgcgttatgtgaaccagaggaccctgggcaccttcctgctgggtatcctgctcatgctggacgtgatgatcataatctacttttcccgcctcctccgctctgacttctgccctgagcatgtccccaagaagcaacacaaagacaagttcttgactgagtgaggggcacagagcctgggacaacaaaaacggacaaggccagaaacagcttcatatggacactgggacttagccccaagcctgggtgtcctctgaggccagcctctccaccttctgagcctgcgcccacactattgaaaacactaatgaaagtaaaaaaaaaaaaaaaaaaaaaaaaaaaaaaaaaaaaaaaaaaaaaaaaaaaaaaaaaaaaaaaaaaaaaaaaaaaaaaaaaaaaaaaaaaaa

SEQ ID NO: 121 - DNA, 566 bp, Homo sapiens
caccatgcctgcttgtcgcctaggcccgctagccgccgccctcctcctcagcctgctgctgttcggcttcaccctagtctcaggcacaggagcagagaagactggcgtgtgccccgagctccaggctgaccagaactgcacgcaagagtgcgtctcggacagcgaatgcgccgacaacctcaagtgctgcagcgcgggctgtgccaccttctgctctctgcccaatgataaggagggttcctgcccccaggtgaacattaactttccccagctcggcctctgtcgggaccagtgccaggtggacagccagtgtcctggccagatgaaatgctgccgcaatggctgtgggaaggtgtcctgtgtcactcccaatttctgagctccagccaccaccaggctgagcagtgaggagagaaagtttctgcctggccctgcatctggttccagcccacctgccctcccctttttcgggactctgtattccctcttgggctgaccacagcttctccctttcccaaccaataaagtaaccactttcagcaaaaaaaaaaaaaaaaaaaaaaaaa

SEQ ID NO: 122 - DNA, 6695 bp, Homo sapiens
cagggatccttccatgaagactgaggcaggcggagctgctaagagcctgctgacatgacatcggccacagagtttgaaaatgtgggcaaccagccaccttacagcaggatcaatgcccgctgggacgccccagacgacgagctggataatgacaacagctcagccaggctctttgagaggtcccggataaaggccttggcagatgagcgggaagttgttcagaaaaagaccttcacgaaatgggtgaactcgcacctggctcgagtgtcctgccgcatcaccgatctctacaaggacctgcgggatgggcgcatgctcatcaagctgctggaggtgctctctggagagatgctgccaaagcccaccaaggggaagatgcgcatccactgcctggagaatgtggacaaggctctccagttcctcaaggagcagcgtgtacacctggagaacatgggctcccacgacattgtagatggcaaccaccgcctggtcctgggcctcatctggaccatcatcctccgcttccagattcaggacattgtggtccaaactcaggaaggtcgtgaaacacgctcagccaaggatgcgttgctgttgtggtgtcagatgaagacggcaggctaccctcatgttaatgtcaccaactttacctccagctggaaggatggcttggcctttaatgccctgatacacaagcaccggcccgacctgatcgactttgataagctgaaggactccaatgcccggcacaacctggagcacgcattcaatgtggctgagcgccagctgggcatcatcccgctcctcgaccccgaagatgtctttacggaaaaccctgatgagaaatccatcatcacctatgtggtggccttttaccactacttctccaagatgaaggtgctggcagtggagggcaagcgtgtcggcaaggttattgaccatgccattgagactgagaagatgattgaaaagtacagcgggctagcctcggacctgctcacctggatcgagcagaccatcactgtcctgaacagccgcaagtttgccaactcgctgacgggcgtccagcagcagctgcaggccttcagcacctaccgcaccgtggagaagccgcccaagtttcaagagaaggggaatctggaagttctactttttaccatccagtcccggatgagagccaacaatcagaaagtgtacacaccccacgatgggaaactagtgtctgacatcaacagggcctgggaaagcctggaggaagctgagtatcggcgggagctggccctgagaaatgagctcattcggcaggagaagctagagcaactggcccggcgctttgaccggaaggccgcaatgagagagacctggctcagtgaaaaccagcgcctcgtggcccaggataactttgggtatgacctggcagctgtggaggccgccaagaagaagcatgaggccatcgagaccgacacggctgcctacgaggagcgggtgagagccctggaggacctggctcaggagctggagaaagagaactaccatgaccagaagcgcatcacggcccgcaaggacaatatactgcgcctatggagctacctgcaggagctgctgcagtcccggcgccagaggctcgagaccaccctggcactgcagaagctcttccaggacatgctgcacagcatcgactggatggatgagatcaaggctcacctcttgtctgccgagtttgggaagcacttgttggaggttgaagacctgctacagaagcacaagttgatggaagctgacatcgccatccaaggggacaaagtgaaggccatcaccgcagccaccctgaagttcaccgaggggaaagggtaccagccttgtgacccccaggtcatccaggaccgcatcagccacttggagcagtgctttgaggagctgagcaacatggcagctgggcggaaggcccaactggagcagtccaaacgactctggaagttcttctgggagatggatgaggctgagagctggatcaaggagaaggagcagatctattcttccctggactatggcaaagacctgaccagtgtgctcatcttacagcgcaagcacaaggcctttgaggatgagctccgtgggctggatgctcacctggagcagatcttccaggaggctcatggcatggttgcgcgcaagcagtttgggcacccgcagatcgaggcccgcataaaggaggtgtcggcacagtgggaccagctgaaggacctggctgccttctgcaagaagaacctccaggatgctgagaactttttccagttccagggcgatgcggatgacctgaaggcttggctgcaagacgcccaccggctgctctctggtgaagatgtggggcaggacgaaggggccacgcgggccctggggaaaaagcacaaggacttcctggaggagctggaggagagccgtggggtgatggagcacctggagcagcaggcccagggattccccgaagagtttcgggattccccagatgtgacccatcggctgcaggccctgcgggagctctaccaacaggtggtggcccaggcggacctgcgtcagcagaggctgcaggaagccctggacctgtacacggtgttcggggagacagacgcctgtgagctgtggatgggagagaaggagaagtggctggccgagatggaaatgccagacaccctggaggacctggaggtcgtgcagcacaggttcgacatcctggaccaggagatgaagaccttgatgactcagattgatggtgtgaacctcgctgccaacagcttggtagagagtggccacccacgcagcagggaggtgaagcagtaccaggaccatctgaacaccaggtggcaggcatttcagaccctggtgtcggagcggcgggaggctgtggactcagccctccgagtgcacaactactgcgtagattgcgaggagaccagcaagtggatcacggacaagacaaaggtagtggagtccacaaaagacctggggcgggacctggcaggtatcatcgccatccagaggaagttgtcagggctggagcgtgacgtggccgccatccaggcccgtgtggatgccctggagcgtgagtcccagcagctgatggactcgcaccctgagcagaaggaggatattggtcagcggcaaaaacacttggaggagctgtggcagggcctgcagcaatccctgcagggccaggaggacttgctgggggaagtcagccagctgcaggccttcctgcaggatctggatgacttccaggcctggctctccatcacccagaaggctgtggcctctgaggacatgcccgaatccctcccagaggctgagcagctcctgcagcagcatgcaggtatcaaggatgagattgacgggcaccaagacagctaccagcgtgttaaggagtctggggagaaagtgatccaaggccagacggacccagagtatctgcttctgggccagcggctggagggcctggatactggctggaatgccctgggcaggatgtgggagagccgcagccacaccctcgctcagtgccttggcttccaggagttccagaaagatgccaagcaggctgaagccatcctcagcaaccaggaatacactctggctcacttggagcccccagactccctggaagctgcagaggctgggatccggaagtttgaggatttcttggggtctatggagaacaaccgggataaggtcttgagtcctgtggactctggaaacaagctggtagctgagggaaacctatactcagacaagatcaaggagaaggtgcagctgattgaggacaggcacaggaagaacaacgagaaggcccaggaggcctctgtcctactgagagacaacctggagctacagaacttcctccagaactgccaggagctcactctctggatcaacgacaagctgctgacatctcaggatgtctcctatgatgaagcacgaaaccttcacaataaatggctaaagcaccaggcgtttgtggcagagctggcttcccatgaagggtggctagagaacatcgatgcggaaggaaagcagctgatggatgagaagccccagtttacagccctggtgtcccaaaagctggaagccctgcaccggctctgggacgagctgcaggccaccacaaaggagaagacccagcacctctcggctgccaggagctccgacctgcgcttgcagacccatgctgacctcaacaagtggatcagcgccatggaggaccagctgcggtcagacgacccgggcaaggacctgaccagtgtcaatcggatgttggctaagctgaagcgagtggaggaccaagtgaatgtgcgaaaagaggagctgggggagctgtttgcccaggtgccttcaatgggagaggagggaggagatgcagacttgagcatcgagaagcggttcctggacctcctggaacccctaggaaggaggaagaagcagctggaatcatccagagccaagctgcagatcagccgggacttagaggatgagacgctttgggtggaggagaggctgcctctggcccagtcagccgactatggcactaatctgcaaactgtgcaactgttcatgaagaagaaccagacactgcagaatgagattctgggccatacgccgcgggttgaggatgtgctgcagagagggcagcagctggtggaggcggcggagatcgactgccaggaccttgaggagcgcctggggcacctgcagagctcctgggacaggctgcgggaggcagcggccgggaggctgcagcgactgagggacgccaacgaggcacagcagtactacctggatgcagacgaggctgaggcctggattggcgagcaggagctctacgtcatctccgatgagatccccaaggatgaagagggcgccattgtgatgctgaagcgacatttgcggcagcagcgtgcggtggaggactacggccggaacatcaagcagctggccagccgggcccagggcctgctgtctgcaggccaccctgagggggaacagatcatcagacttcaggggcaagtggacaagcactacgcagggctgaaggacgtggcggaagagcgcaagcgcaagctggagaacatgtaccacctgttccagctcaagcgggagaccgacgacctggagcagtggatttcagaaaaggagctagtggcctcttccccggaaatggggcaagactttgaccacgtgactcttctgcgggacaagttccgggactttgcccgggagaccggggcgattgggcaggagcgggtggacaatgtgaatgccttcatcgagcgactcatcgacgcgggccacagcgaggcggccaccatcgccgagtggaaggacgggctgaacgagatgtgggcagacctcctggagctcattgacacgcgcatgcagctgctggccgcctcctatgacctgcaccgctacttctacacgggtgccgagatcctgggcctcatcgacgagaagcaccgcgagctgcccgaggacgtggggctggacgccagcacggccgagtccttccaccgggtgcacacagccttcgagcgggagctccacctgctgggtgtccaggtgcagcagttccaggacgtggccacccgtctgcagacagcatatgctggggagaaggcagaggccatccagaacaaggagcaggaggtgtctgccgcgtggcaggcgctgctcgatgcctgtgccgggcgccggacccagctagtggacacggcggataaattccgcttcttcagcatggcccgtgacctcctctcctggatggagagcatcatccggcagatcgagacccaggagaggcccagggatgtctcctctgtggaactgctcatgaagtatcaccagggcatcaatgcagagattgaaacccggagcaagaacttcagtgcctgcctggagcttggcgagtccctgctgcagcggcagcaccaggcctcagaggagatccgcgagaaactgcagcaggtgatgtccaggaggaaagagatgaatgagaagtgggaagcccgctgggagcggctccgcatgttgctggaggtgtgccagttctcgagggatgcctctgtggctgaggcgtggctgattgcccaggagccctacctggccagcggggactttggacacacagtggacagtgtggagaagctcatcaagaggcatgaggcttttgagaagtccacggccagctgggcagagcgctttgctgccctggagaagcccaccacgcttgagctgaaagaacgccagattgcagagagacccgcagaggagactgggcctcaagaggaggaaggcgagacagcaggggaggctccagtttcccaccatgcggccaccgagagaacgtccccggtcagtctctggtctcgtttgtctagttcctgggagtcactgcagccagagccctctcacccctactaggctcagcccaggtggaggcgagatgagctggcgcagccccgccctccatcctccccacatccctgcagccacctcccagcagagcaggctacgtcctcactgaggtgttcttcatgagagtactagcctcctccactcctccccacagcgcagaggaaacaggccagcccagtgacatgacgttattagttttgttttacctaatgtaataaattttattgtataaa

SEQ ID NO: 123 - DNA, 5917 bp, Homo sapiens
agccgttctccaattaaagctgttaacgtgtactacgctgtttccttgttggattttcttgttctctgctgctactgtaaaaacgaaatgagtggtcctgctcaggttccaatgatgtccccaaatggttctgtgcctcctatctatgtgcctcctggatatgccccacaggttattgaagacaatggtgttcgaagagttgtcgtggtccctcaggcaccagagtttcaccctggtagtcacacagttctccaccgttctccacatcctcctctacctggtttcattcctgtcccaactatgatgccgcctccaccacgtcatatgtactcacccgtgactggagctggagacatgacaacacagtatatgccacagtatcagtcttcacaagtctatggagatgtagatgctcactctacacatggaaggtccaactttagagatgaacgatctagtaaaacatatgaacgtttgcagaaaaaattgaaggatcgccaaggaacacagaaagataaaatgagcagtccaccatcatcaccccagaaatgcccttctcccattaatgaacataatggacttataaaaggacaaattgctggtggtataaacacaggatcagcaaaaatcaagtctgggaaggggaaaggtggtacacaagttgatacagaaattgaagaaaaagatgaagaaactaaagcatttgaagcacttctttccaacattgtcaaaccagtggcctccgacatccaggcaaggacagtagtacttacctggtcaccaccttccagcctcattaatggtgaaacagatgaaagtagtgtaccagagctctatggttatgaagttctgatctcaagtactggaaaagatgggaaatacaaaagtgtatatgtaggagaagaaacaaatatcactttaaatgatctcaagccagccatggattaccatgcaaaagtccaggcagaatataattctataaagggaactccttcagaggctgaaatctttaccaccttgagctgtgaacctgatatacctaatccaccaaggatagccaatcggaccaaaaattcactcactttgcaatggaaggcacctagtgacaatggttctaaaatccaaaactttgtattagaatgggatgaaggaaaaggaaatggagaattttgtcagtgttacatgggctcacagaaacaatttaaaattactaaactttcaccagcaatgggctgtaaattcagactatcggccagaaatgactatggtacaagtggttttagtgaagaagtcttatattacacctcaggctgtgctccttctatgccagcaagtcctgtattaaccaaggctggaattacttggttatccttacaatggagtaagccctcaggaacaccatcagatgaaggaatttcttacattttagagatggaggaagaaacttcaggatatggttttaagcctaaatatgatggagaagatcttgcttacacagtgaaaaatctcagacgtagtactaagtataaatttaaggttattgcttacaactcagaaggtaaaagtaatccaagtgaagtagtagaatttactacttgccctgataaaccaggcatacctgtaaagccttcagtgaaaggaaagatacattcacacagttttaaaataacctgggatccaccaaaagacaatggcggagcaaccatcaataaatatgtagtggagatggcagaaggttctaacggaaacaaatgggaaatgatatacagtggtgctaccagggaacatctttgtgatcgactgaatccaggctgtttctatcgtttacgagtttactgcatcagtgatggaggacagagtgcggtctctgaatctttacttgtgcagactccagctgtgcctcctggcccatgcctccctcccagattacagggtagacccaaagcaaaagaaatacagttacgatggggaccccctctggttgatggtggatcacccatttcctgttacagtgtggaaatgtctcctatagaaaaagatgaacctagagaagtttaccaaggttctgaagtagaatgtacagtgagcagccttcttcctggaaagacatacagcttcagactacgtgcagctaacaaaatggggtttggaccattttcagaaaaatgtgatattactacagcccctgggccaccagatcagtgcaagccccctcaagtgacatgtagatctgcaacttgtgcacaagtgaattgggaggttcctttgagtaatggaacagatgtcactgaatatcgactggagtggggaggagttgaaggaagtatgcagatatgttactgtgggcctggtctcagttatgaaataaaaggactttcaccagcaactacctattattgcagggtccaggctctgagtgttgtgggtgcaggccctttcagtgaagtagtagcctgtgtgactccaccatcagttcctggcattgtgacctgtcttcaagaaataagcgatgatgagatagaaaatccccattattcaccttctacatgccttgcaataagctgggaaaagccttgtgatcatggttcggaaatccttgcctacagcatagactttggagataaacaatccctaacagtgggaaaggttacaagctatattatcaacaatttgcaaccagatacaacatacagaatacgaattcaagccttgaatagccttggagctggtcctttcagccatatgataaaattaaaaactaagcctctccctcctgatccacctcgtctggaatgtgttgcctttagccaccagaaccttaagctgaaatggggagaaggaactccaaagacattgtcaaccgattctattcagtaccaccttcagatggaggataagaatggacggtttgtatccctatacagaggaccatgtcatacatacaaagtacaaagacttaatgagtcaacatcctataaattctgtattcaagcttgtaatgaagctggggaaggtcccctctcccaagaatatattttcactactccaaaatctgtcccagctgccttgaaagcccccaaaatagagaaagtaaatgatcacatttgtgaaattacatgggagtgtttacagccaatgaaaggtgatccagttatttacagtcttcaagttatgttgggaaaagattcagaattcaaacagatttacaagggtcccgactcttccttccggtattccagccttcagctgaactgtgaatatcgcttccgtgtatgtgccattcgccagtgccaagactctctgggacaccaggacctcgtaggtccctacagcaccacagtgctcttcatctctcagaggactgaaccaccagccagcaccaacagagacactgtggaaagcacaaggacccgacgggcactgagtgacgagcagtgtgctgccgtcatccttgtgctgtttgctttcttttccattttgattgcctttatcattcagtactttgtaatcaagtgaaaatataactttattttttaactctattacattttattttgtcatgtactaaaattatttctgtattgcttttataaaaaacagtggcatttagcactggcattgagactatagcacatcatttttgccattttcagtgcttatattgttaggtagaggctggcactttattagaatgcaagccacaaaaatatcaattttgttttttttgttagggtgggtcttctttttttctttccctctctctttttttaacaaatgccttcttatagaaaaactttctaagaggcaacaatttagaatggatattttgacgaatcggcatgagtgtaacagtgataacctgatctgtttgttttaaagattattaccaagtgaaaaattcagaatgaatagaatttacactaacatgctatataaaatgttaaagtctgatgctgtgaaagcaatctagtgctatatttctacctcctcatttgtcttaattatttggtaagtgggattatgatgagtaactggaggggcttagaaacaaaaactggatgaaagagtatgcatgaagaaaagcttctttgataaatgtggagttcttcattataaatatatattcatgaattcacagataagtacttaaagaacagacagtttacttggcctaaaaatattttgatgtttactcaaaaagtacctcttcaggtcttgagaacatggaaaagaattgagtgcttttaaatactttttagaaagtaatcataaaagtaaattgaatttcaaacctatttggcttctgttttgtgaacctttgaactatatgtatgtgtataagggtatacacatacatatatggcatataacaagtgtacacatatacacataacaagtgtagaagtatatattacatacatacactcactctgtctggtataggctaattttgaagaactcccataagtttctgctgcttctcccataactgctgccaccaccatcagaattcataatcaaacctaacctttttgtttggggcaccaaatctgaagacaaaattaatttgcaccagtaaacttcaagctgctttctttcttgaaaactaaacgtttaacgtataatgtctgtttggatactgttccaaattgttgattgcatgtggttaatgttgcattagagcactttgcaattgcataattcattaatgttttgtgagcttgcatttgtgagttattggatgatcagactgaattttgtcaagtatcacattgtacatcttgcctagatgtcgatgactgcaagtaataatacagtttataatgaaactatctacaattcttgttttagcacatctgttatccgtaaaacacctgtaactagcttttttaatttattatttgaattttaggatagcgaatcactaatttttagttgctgaggttggcattttagtgattattaagcacttctgtcagtctttgaaaaaagaacgtattttttgtgctttgaagatctctgaagaatttcttttataatagaatgggcatgtattgtaacagttttatgtcaaatgatctgtgctgtagaaaaacattaacccttgttcaaaaaagaaatggataaacttggcctttctaagtggtaagaatgacctgtcactataatatactgtatgtttacattttatttaaatttaatctcttatgtatagggtgataaccttccccagaaacaacagtgattgcgattgttttctagaaacttctttaaagtgccacatttggcagtacaaatgagtctgagtgtaatagcccagagatttatatatagttgaatgtctaaaatggtaaaatgtgccactgtgtcaagttacagtggcttatgtttttcatagtaattcaaatgaacttcctatttttgatagtaaatgtcatttaatagtatacttgccatttgagcctcactgcaaaattagtgcagaggagaaaacaatttttaatgtaatcttgattttacctcatatactgtacattccaaaaactctaaactttttaaagattatagatacactaccaaacatatcaccttaaaattgtataaggctgaatgaacttcatacaaatgaaaaaaatctcataaaaatacataaactatgtagcaaaagtatctgtaaaatccatggaaaataaaagttgtatcattctttttgagatacgtttattgtattcatatatattcattatttgctacctgtttaagaaagtgaaatgttatggtctcccctcttccaatgagcttaaaacatttttcccaacagtatataaatcttcaacatgagaggatgtatatttattatataaagcccagtaaagaataaaattagaagttttatcctaaaaaaaaaaaaaaaaaa

SEQ ID NO: 124 - DNA, 2612 bp, Homo sapiens
tgcagagggcgcagctccaccgtggtaacttgcaatgtggccgcccctgcgctggcttctttctcctcggccctcggtgaacccagcttttcctttaaagcatagacaaatccttgcttagggtcagccagaccgtgggcttgctttgggctcccgcgtggacgctgaaggctcttcatgatttctcagaaaccttggtgggccacccaaaaagtgtgttggaaatccacggtgatccttaatatggtgatgggattgtccgaaaaggatttcagatgcatgccaggtttccactgattgccagaactcgagatcactacacatggatccccaaaatcaacatggcagtggcagttcgttagttgtgatccagcagccttctttggatagccgtcagagattagactatgagagagagattcagcctactgctattttgtccttagaccagatcaaggccataagaggcagcaatgaatacacagaagggccttcggtggtgaaaagacctgctcctcggacagcaccaagacaagaaaagcatgaaaggactcatgaaatcataccaattaatgtgaataataactacgagcacagacacacaagccacctgggacatgcagtactcccaagtaatgccaggggccccattttgagcagatcaaccagcactggaagtgcagccagctctgggagcaacagcagtgcctcttctgaacagggactgttaggaaggtcaccaccaaccagaccagtccctggtcataggtctgaaagggcaatccggacccagcccaagcaactgattgtggatgacttgaagggttccttgaaagaggacctgacacagcacaagttcatttgtgaacagtgtgggaagtgcaagtgtggagaatgcactgctcccaggaccctaccatcctgtttggcctgtaaccggcagtgcctttgctctgctgagagcatggtggaatatggaacctgcatgtgcttagtcaagggcatcttctaccactgctccaatgacgacgaaggggattcctattcagataatccttgctcctgttcacaatcacactgctgctctagatacctgtgtatgggagccatgtctttatttttaccttgcttactctgttatcctcctgctaaaggatgcctgaagctgtgcaggaggtgttatgactggatccatcgcccagggtgcagatgtaagaactccaacactgtctattgtaagctggagagctgcccctcccggggtcagggtaaaccatcatgatttttggaggtgggttgtacctcctgaacttttagctttcaagttgtggctgttttttgtttttgtttttgtttttgttttctttagaatttttccctgtttcccaccttctcttcccctgttgccaaggtctaactcatggatttttctctttcctcatggatgatcttcagcaagagtggactgggaagctgcacctggctcccactttcaacaagagcctctgccatccacttgagggtattgagagccagtgggcttttgtgtagcctttttgttctgcaagcaactttctaaagttgtgtacatgaacatacacccacatccagactacagtgatttagagttgttttgattgggtaccgtgggagcagggaaattggttttttaaaaagcaactgtttaattgcttaaataagctatgtattaaatctgtctccagttagggctatcttcctagcataggccccttaagtagcatgggggatatattttttgctataacgtaaaaattttcctttaaccactgccctctccttctttctccttcaaggttctttccccctcagttttgttgttgtcttactctggagatgccaagtgtattttttctttctatgtaattttagattcgccttacaatgtaaatcttcacattggagataatattggttggaccttgcccatcttcactctagccttcgtatttgtgaaggactcagccaccttccttcttcaccccatgcttctcaccaaatttttgttgtcattgagggcacttggataactcaagttgatatttatagctgatcaatctatatgtgtcacagaactatgctgcctaaagtgatcttggctccttaatggtccttttggccccttggatagttaacagctgagtaattctaatctcttctgtgttttccttgccttaaccacaaattgtggtgctttttgtatattttatgtataaatcacaaagttgaattctgactatttttaagacaaaagtctgttaaacttttttattgtaaagaatatttattatgcgaatctctattattttatggtatttattgcaaaagactgttgaaatgtactcatgtttgaatataacaaaatatcaatacttaacggaaaataaggtgacacgaagaaagtacatatgttaactataatgcagaaaatatattaattaatgaaaaaaaaaaaaaaaaaaaaaaaaaaaaaaaaaaaaaaaaaaaaaaaaaaaaaaaaaaaaaaaaaaaaaaaaaaaaaaaaaaaaaaaaaaaaaaaaaaaaaaaaaaaaaaaaaaaaaaaaaaaaaaaaa

SEQ ID NO: 125 - DNA, 5619 bp, Homo sapiens
cagcccgccactgccacccggccccgtgcgctcattggtcgggatgtgtcggctcagcagcctccaacttctcccgaatcccactgattttaggtgatgggcaagtcagaaagtcagatggatataactgatatcaacactccaaagccaaagaagaaacagcgatggactccactggagatcagcctctcggtccttgtcctgctcctcaccatcatagctgtgacaatgatcgcactctatgcaacctacgatgatggtatttgcaagtcatcagactgcataaaatcagctgctcgactgatccaaaacatggatgccaccactgagccttgtacagactttttcaaatatgcttgcggaggctggttgaaacgtaatgtcattcccgagaccagctcccgttacggcaactttgacattttaagagatgaactagaagtcgttttgaaagatgtccttcaagaacccaaaactgaagatatagtagcagtgcagaaagcaaaagcattgtacaggtcttgtataaatgaatctgctattgatagcagaggtggagaacctctactcaaactgttaccagacatatatgggtggccagtagcaacagaaaactgggagcaaaaatatggtgcttcttggacagctgaaaaagctattgcacaactgaattctaaatatgggaaaaaagtccttattaatttgtttgttggcactgatgataagaattctgtgaatcatgtaattcatattgaccaacctcgacttggcctcccttctagagattactatgaatgcactggaatctataaagaggcttgtacagcatatgtggattttatgatttctgtggccagattgattcgtcaggaagaaagattgcccatcgatgaaaaccagcttgctttggaaatgaataaagttatggaattggaaaaagaaattgccaatgctacggctaaacctgaagatcgaaatgatccaatgcttctgtataacaagatgacattggcccagatccaaaataacttttcactagagatcaatgggaagccattcagctggttgaatttcacaaatgaaatcatgtcaactgtgaatattagtattacaaatgaggaagatgtggttgtttatgctccagaatatttaaccaaacttaagcccattcttaccaaatattctgccagagatcttcaaaatttaatgtcctggagattcataatggatcttgtaagcagcctcagccgaacctacaaggagtccagaaatgctttccgcaaggccctttatggtacaacctcagaaacagcaacttggagacgttgtgcaaactatgtcaatgggaatatggaaaatgctgtggggaggctttatgtggaagcagcatttgctggagagagtaaacatgtggtcgaggatttgattgcacagatccgagaagtttttattcagactttagatgacctcacttggatggatgccgagacaaaaaagagagctgaagaaaaggccttagcaattaaagaaaggatcggctatcctgatgacattgtttcaaatgataacaaactgaataatgagtacctcgagttgaactacaaagaagatgaatacttcgagaacataattcaaaatttgaaattcagccaaagtaaacaactgaagaagctccgagaaaaggtggacaaagatgagtggataagtggagcagctgtagtcaatgcattttactcttcaggaagaaatcagatagtcttcccagccggcattctgcagccccccttctttagtgcccagcagtccaactcattgaactatgggggcatcggcatggtcataggacacgaaatcacccatggcttcgatgacaatggcagaaactttaacaaagatggagacctcgttgactggtggactcaacagtctgcaagtaactttaaggagcaatcccagtgcatggtgtatcagtatggaaacttttcctgggacctggcaggtggacagcaccttaatggaattaatacactgggagaaaacattgctgataatggaggtcttggtcaagcatacagagcctatcagaattatattaaaaagaatggcgaagaaaaattacttcctggacttgacctaaatcacaaacaactatttttcttgaactttgcacaggtgtggtgtggaacctataggccagagtatgcggttaactccattaaaacagatgtgcacagtccaggcaatttcaggattattgggactttgcagaactctgcagagttttcagaagcctttcactgccgcaagaattcatacatgaatccagaaaagaagtgccgggtttggtgatcttcaaaagaagcattgcagcccttggctagacttgccaacaccacagaaatggggaattctctaatcgaaagaaaatgggccctaggggtcactgtactgacttgagggtgattaacagagagggcaccatcacaatacagataacattaggttgtcctagaaagggtgtggagggaggaagggggtctaaggtctatcaagtcaatcatttctcactgtgtacataatgcttaatttctaaagataatattactgtttatttctgtttctcatatggtctaccagtttgctgatgtccctagaaaacaatgcaaaacctttgaggtagaccaggatttctaatcaaaagggaaaagaagatgttgaagaatacagttaggcaccagaagaacagtaggtgacactatagtttaaaacacattgcctaactactagtttttacttttatttgcaacatttacagtccttcaaaatccttccaaagaattcttatacacattggggccttggagcttacatagttttaaactcatttttgccatacatcagttattcattctgtgatcatttattttaagcactcttaaagcaaaaaatgaatgtctaaaattgttttttgttgtacctgctttgactgatgctgagattcttcaggcttcctgcaattttctaagcaatttcttgctctatctctcaaaacttggtatttttcagagatttatataaatgtaaaaataataatttttatatttaattattaactacatttatgagtaactattattataggtaatcaatgaatattgaagtttcagcttaaaataaacagttgtgaaccaagatctataaagcgatatacagatgaaaatttgagactatttaaacttataaatcatattgatgaaaagatttaagcacaaactttagggtaaaaattgccattggacagttgtctagagatatatatacttgtggttttcaaattggactttcaaaattaaatctgtccctgagagtgtctctgataaaagggcaaatctgcacctatgtagctctgcatctcctgtcttttcaggtttgtcatcagatggaaatattttgataataaattgaaattgtgaactcattgctccctaagactgtgacaactgtctaactttagaagtgcatttctgaatagaaatgggaggcctctgatggaccttctagaattataagtcacaaagagttctggaaaagaactgtttactgcttgataggaattcatcttttgaggcttctgttcctctcttttcctgttgtattgactattttcgttcattacttgattaagattttacaaaagaggagcacttccaaaattcttatttttcctaacaaaagatgaaagcagggaatttctatctaaatgatgagtattagttccctgtctcttgaaaaatgcccatttgcctttaaaaaaaaaagttacagaaatactataacatatgtacataaattgcataaagcataagtatacagttcaataaacttaactttaactgaacaatggccctgtagccagcacctgtaagaaacagagcagtaccagcgctctaaaagcacctccttgtcactttattactcccagaacaacaactatcctgacttctaatatcattcactagctttgcctggttttgtcttttatgcagatagaatcaatcagtatgtattcttttgtgcctggcttctttctctcagccttacatttgtgagattcctctgtattgtgctgattgtggatcttttcattctcattgcagaataatgttctattgtgggacttattacaatttgttcatcctattgttgatgggcacttgagaactttccattttggcgctattacaaatagtgcaactatgaatgtactgcatgttaccatcttacttgagcctttaatggacttatttcttcaaatccttccaaaaattattataagcattgaaattatagtttcaagccaactgtggatacccttaccctttcctcctttatcacaaccaccgttacaagtatacttatatttccctaaaatacatttaaaacttacctaagtgacatttgtagttggagtaataggagcttccagctctaataaaacagctgtctctaacttattttatttccatcatgtcagagcaggtgaagagccagaagtgaagagtgactagtacaaattataaaaagccactagactcttcactgttagctttttaaaacattaggctcccatccctatggaggaacaactctccagtgcctggatcccctctgtctacaaatataagattttctgggcctaaaggatagatcaaagtcaaaaatagcaatgcctccctatccctcacacatccagacatcatgaattttacatggtactcttgttgagttctgtagagccttctgatgtctctaaagcactaccgattctttggagttgtcacatcagataagacatatctctaattccatccataaatccagttctactatggctgagttctggtcaaagaaagaaagtttagaagctgagacacaaagggttgggagctgatgaaactcacaaatgatggtaggaagaagctctcgacaatacccgttggcaaggagtctgcctccatgctgcagtgttcgagtggattgtaggtgcaagatggaaaggattgtaggtgcaagctgtccagagaaaagagtccttgttccagccctattctgccactcctgacagggtgaccttgggtatttgcaatattcctttgggcctctgcttctctcacctaaaaaaagagaattagattatattggtggttctcagcaagagaaggagtatgtgtccaatgctgccttcccatgaatctgtctcccagttatgaatcagtgggcaggataaactgaaaactcccatttacgtgtctgaatcgagtgagacaaaattttagtccaaataacaagtaccaaagttttatcaagtttgggtctgtgctgctgttactgttaaccatttaagtggggcaaaaccttgctaattttctcaaaagcatttatcattcttgttgccacagctggagctctcaaactaaaagacatttgttattttggaaagaagaaagactctattctcaaagtttcctaatcagaaatttttatcagtttccagtctcaaaaatacaaaataaaaacaaacgtttttaatactattgcttttatgcctagtcaactctg

SEQ ID NO: 126 - DNA, 1092 bp, Homo sapiens
cagtcatggctgccgccgtcgctgctgccggtgcaggggaaccccagtccccggacgaattgctcccgaaaggcgacgcggagaagcctgaggaggagctggaggaggacgacgatgaggagctagatgagaccctgtcggagagactatggggcctgacggagatgtttccggagagggtccggtccgcggccggagccacttttgatctttccctctttgtggctcagaaaatgtacaggttttccagggcagccttgtggattgggaccacttcctttatgatcctggttcttcccgttgtctttgagacggagaagttgcaaatggagcaacagcagcaactgcagcagcggcagatacttctaggacctaacacagggctctcaggaggaatgccaggggctctaccctcacttcctggaaagatctagattgttattgctgtttgagctgtctcagtgggataagtttgaaattcaagtgtttgaactgctgataatttggatttttttttttttaactttggcacattgatctatctaaacccggtggggagaattatccccacattgtctcatggaaagactcaacttgcaactgtgccctccacactatccttacttctgtctccactctgataccagagtgcagccatgcagacggttattccagctctggtcacccgactcctttcaccaaattgctcctaactggaagatctcactttccccttgtggggtaggaaccgatgccagtgggagggatgtgcccctgaccattaacgactgtttttttttttttttttaaagaatggagttgttggggcgggacatgcacacaatgtgaaacagacaaaatgcattacacctgtagtgtaaagtggccactatgaatccctatgtatgagaggagggaggcaggctgcagcttcagccacagaatggggactatggaagacagcaggagctcatttcctctgcacattttggctgttagacctgtgtgtgtgtttaaaaaaagagaagtcagtgctcactttttgtatttaaatattaaaaatgattccaactgaaaaaaaaaaaaaaaaaa

SEQ ID NO: 127 - DNA, 1486 bp, Homo sapiens
agcagcaggaggaggcagagcacagcatcgtcgggaccagactcgtctcaggccagttgcagccttctcagccaaacgccgaccaaggaaaactcactaccatgagaattgcagtgatttgcttttgcctcctaggcatcacctgtgccataccagttaaacaggctgattctggaagttctgaggaaaagcagctttacaacaaatacccagatgctgtggccacatggctaaaccctgacccatctcagaagcagaatctcctagccccacagacccttccaagtaagtccaacgaaagccatgaccacatggatgatatggatgatgaagatgatgatgaccatgtggacagccaggactccattgactcgaacgactctgatgatgtagatgacactgatgattctcaccagtctgatgagtctcaccattctgatgaatctgatgaactggtcactgattttcccacggacctgccagcaaccgaagttttcactccagttgtccccacagtagacacatatgatggccgaggtgatagtgtggtttatggactgaggtcaaaatctaagaagtttcgcagacctgacatccagtaccctgatgctacagacgaggacatcacctcacacatggaaagcgaggagttgaatggtgcatacaaggccatccccgttgcccaggacctgaacgcgccttctgattgggacagccgtgggaaggacagttatgaaacgagtcagctggatgaccagagtgctgaaacccacagccacaagcagtccagattatataagcggaaagccaatgatgagagcaatgagcattccgatgtgattgatagtcaggaactttccaaagtcagccgtgaattccacagccatgaatttcacagccatgaagatatgctggttgtagaccccaaaagtaaggaagaagataaacacctgaaatttcgtatttctcatgaattagatagtgcatcttctgaggtcaattaaaaggagaaaaaatacaatttctcactttgcatttagtcaaaagaaaaaatgctttatagcaaaatgaaagagaacatgaaatgcttctttctcagtttattggttgaatgtgtatctatttgagtctggaaataactaatgtgtttgataattagtttagtttgtggcttcatggaaactccctgtaaactaaaagcttcagggttatgtctatgttcattctatagaagaaatgcaaactatcactgtattttaatatttgttattctctcatgaatagaaatttatgtagaagcaaacaaaatacttttacccacttaaaaagagaatataacattttatgtcactataatcttttgttttttaagttagtgtatattttgttgtgattatctttttgtggtgtgaataaatcttttatcttgaatgtaataagaaaaaaaaaaaaaaaataaaaaaaaaaaaaaaaaaaaaaaaaaaaa

SEQ ID NO: 128 - DNA, 4194 bp, Homo sapiens
cctgatccgaggagaccccgcgctcccgcagccatgggcaccgggggccggcggggggcggcggccgcgccgctgctggtggcggtggccgcgctgctactgggcgccgcgggccacctgtaccccggagaggtgtgtcccggcatggatatccggaacaacctcactaggttgcatgagctggagaattgctctgtcatcgaaggacacttgcagatactcttgatgttcaaaacgaggcccgaagatttccgagacctcagtttccccaaactcatcatgatcactgattacttgctgctcttccgggtctatgggctcgagagcctgaaggacctgttccccaacctcacggtcatccggggatcacgactgttctttaactacgcgctggtcatcttcgagatggttcacctcaaggaactcggcctctacaacctgatgaacatcacccggggttctgtccgcatcgagaagaacaatgagctctgttacttggccactatcgactggtcccgtatcctggattccgtggaggataattacatcgtgttgaacaaagatgacaacgaggagtgtggagacatctgtccgggtaccgcgaagggcaagaccaactgccccgccaccgtcatcaacgggcagtttgtcgaacgatgttggactcatagtcactgccagaaagtttgcccgaccatctgtaagtcacacggctgcaccgccgaaggcctctgttgccacagcgagtgcctgggcaactgttctcagcccgacgaccccaccaagtgcgtggcctgccgcaacttctacctggacggcaggtgtgtggagacctgcccgcccccgtactaccacttccaggactggcgctgtgtgaacttcagcttctgccaggacctgcaccacaaatgcaagaactcgcggaggcagggctgccaccagtacgtcattcacaacaacaagtgcatccctgagtgtccctccgggtacacgatgaattccagcaacttgctgtgcaccccatgcctgggtccctgtcccaaggtgtgccacctcctagaaggcgagaagaccatcgactcggtgacgtctgcccaggagctccgaggatgcaccgtcatcaacgggagtctgatcatcaacattcgaggaggcaacaatctggcagctgagctagaagccaacctcggcctcattgaagaaatttcagggtatctaaaaatccgccgatcctacgctctggtgtcactttccttcttccggaagttacgtctgattcgaggagagaccttggaaattgggaactactccttctatgccttggacaaccagaacctaaggcagctctgggactggagcaaacacaacctcaccatcactcaggggaaactcttcttccactataaccccaaactctgcttgtcagaaatccacaagatggaagaagtttcaggaaccaaggggcgccaggagagaaacgacattgccctgaagaccaatggggaccaggcatcctgtgaaaatgagttacttaaattttcttacattcggacatcttttgacaagatcttgctgagatgggagccgtactggccccccgacttccgagacctcttggggttcatgctgttctacaaagaggccccttatcagaatgtgacggagttcgacgggcaggatgcgtgtggttccaacagttggacggtggtagacattgacccacccctgaggtccaacgaccccaaatcacagaaccacccagggtggctgatgcggggtctcaagccctggacccagtatgccatctttgtgaagaccctggtcaccttttcggatgaacgccggacctatggggccaagagtgacatcatttatgtccagacagatgccaccaacccctctgtgcccctggatccaatctcagtgtctaactcatcatcccagattattctgaagtggaaaccaccctccgaccccaatggcaacatcacccactacctggttttctgggagaggcaggcggaagacagtgagctgttcgagctggattattgcctcaaagggctgaagctgccctcgaggacctggtctccaccattcgagtctgaagattctcagaagcacaaccagagtgagtatgaggattcggccggcgaatgctgctcctgtccaaagacagactctcagatcctgaaggagctggaggagtcctcgtttaggaagacgtttgaggattacctgcacaacgtggttttcgtccccaggccatctcggaaacgcaggtcccttggcgatgttgggaatgtgacggtggccgtgcccacggtggcagctttccccaacacttcctcgaccagcgtgcccacgagtccggaggagcacaggccttttgagaaggtggtgaacaaggagtcgctggtcatctccggcttgcgacacttcacgggctatcgcatcgagctgcaggcttgcaaccaggacacccctgaggaacggtgcagtgtggcagcctacgtcagtgcgaggaccatgcctgaagccaaggctgatgacattgttggccctgtgacgcatgaaatctttgagaacaacgtcgtccacttgatgtggcaggagccgaaggagcccaatggtctgatcgtgctgtatgaagtgagttatcggcgatatggtgatgaggagctgcatctctgcgtctcccgcaagcacttcgctctggaacggggctgcaggctgcgtgggctgtcaccggggaactacagcgtgcgaatccgggccacctcccttgcgggcaacggctcttggacggaacccacctatttctacgtgacagactatttagacgtcccgtcaaatattgcaaaaattatcatcggccccctcatctttgtctttctcttcagtgttgtgattggaagtatttatctattcctgagaaagaggcagccagatgggccgctgggaccgctttacgcttcttcaaaccctgagtatctcagtgccagtgatgtgtttccatgctctgtgtacgtgccggacgagtgggaggtgtctcgagagaagatcaccctccttcgagagctggggcagggctccttcggcatggtgtatgagggcaatgccagggacatcatcaagggtgaggcagagacccgcgtggcggtgaagacggtcaacgagtcagccagtctccgagagcggattgagttcctcaatgaggcctcggtcatgaagggcttcacctgccatcatgtggtgcgcctcctgggagtggtgtccaagggccagcccacgctggtggtgatggagctgatggctcacggagacctgaagagctacctccgttctctgcggccagaggctgagaataatcctggccgccctccccctacccttcaagagatgattcagatggcggcagagattgctgacgggatggcctacctgaacgccaagaagtttgtgcatcgggacctggcagcgagaaactgcatggtcgcccatgattttactgtcaaaattggagactttggaatgaccagagacatctatgaaacggattactaccggaaagggggcaagggtctgctccctgtacggtggatggcaccggagtccctgaaggatggggtcttcaccacttcttctgacatgtggtcctttggcgtggtcctttgggaaatcaccagcttggcagaacagccttaccaaggcctgtctaatgaacaggtgttgaaatttgtcatggatggagggtatctggatcaacccgacaactgtccagagagagtcactgacctcatgcgcatgtgctggcaattcaaccccaagatgaggccaaccttcctggagattgtcaacctgctcaaggacgacctgcaccccagctttccagaggtgtcgttcttccacagcgaggagaacaaggctcccgagagtgaggagctggagatggagtttgaggacatggagaatgtgcccctggaccgttcctcgcactgtcagagggaggaggcggggggccgggatggagggtcctcgctgggtttcaagcggagctacgaggaacacatcccttacacacacatgaacggaggcaagaaaaacgggcggattctgaccttgcctcggtccaatccttcctaacagtgcctaccgtggcgggggcgggcaggggttcccattttcgctttc

SEQ ID NO: 129 - DNA, 4988 bp, Homo sapiens
agaaaaacggggagcaggagccagactaggggaggaagaggactggcccgctcagggaatagctgggttgctgcaaaaaggggcggggagaaggcgggggcgctgcatgcagcgcgctggctccagcggtggccgcggggaatgtgacatcagcggcgccgggcgcttggggctggaggaggcagctcgcctcagctgcgctgtgcacacctcgcccgggggaggacgcagacccgggcaggcggcagggatgtcggcgaaggagaggccaaagggcaaagtgatcaaggacagcgtcaccctcctgccctgcttttatttcgtcgagttgcctatattggcatcatcggtggttagcctctatttcctcgaactcacagatgtcttcaaacctgtgcactctggatttagctgctatgaccggagtcttagcatgccgtacattgaaccaacccaggaggcaattccattcctcatgttgcttagcttggcttttgctggacctgcaattacgattatggtaggagaaggaattctctactgttgcctctccaaaagaagaaatggggtcggactagagcccaacattaatgctggaggctgcaacttcaattccttcctcagacgagctgtcagattcgttggtgttcatgtatttggattatgctctacagctctcattacagatatcatacagctgtccacaggatatcaagcaccttactttctgactgtgtgcaaaccaaactatacctctctgaatgtatcttgcaaagaaaattcctacattgtggaagatatttgctcaggatctgacctcacagttatcaacagtggcagaaagtccttcccttctcaacatgcaacccttgctgcctttgcagctgtgtatgtttcgatgtacttcaattccacattaacggattcctctaagcttctgaaacctctcttggtcttcacatttatcatctgtggaataatctgcgggctaacacggataactcagtataagaaccacccagttgatgtctattgtggctttttaataggaggaggaattgcactgtacttgggcttgtatgctgtggggaatttcctgcccagtgatgagagtatgtttcagcacagagacgccctcaggtctctgacagacctcaatcaagatcccaaccgacttttatctgctaaaaatggtagcagcagtgatggaattgctcatacagaaggcatcctcaaccgaaaccacagagatgctagctctctgacaaatctcaaaagagcaaatgctgatgtggaaatcattactccacggagccccatggggaaggagaacatggttaccttcagcaataccttgccgcgagccaataccccatctgtagaagaccctgtcagaagaaatgcgagcattcatgcctctatggattccgctcgatcaaagcagctcctcacccagtggaagaataagaatgaaagtcgaaagttgtccttgcaagttatagagcctgagcctgggcagtcaccacccagatccatagaaatgaggtcaagctcagagccatcgagggtaggggtgaatggagaccaccatggtcctggcaatcagtacctcaaaatccagcctggcgctgtccccggatgtaacaacagcatgcctggagggccaagagtgtccattcagtcccgtcctgggtcctcacagttggtgcacatccctgaggagactcaggaaaacataagcacctcccccaaaagcagctctgctcgggccaagtggttaaaagctgctgaaaagactgtggcctgtaacagaagcaacagccagccccgaatcatgcaagtcatagccatgtccaagcagcagggtgtcctccaaagcagccccaagaacactgaaggcagcacggtctcctgcactggctccatccgctataaaaccttgacagaccatgagcccagtgggatagtgagggttgaggctcacccagagaacaacaggcccatcatacagatcccgtccactgaaggtgaaggcagtggctcctggaagtggaaagcccctgaaaagggcagccttcgccaaacttacgagctcaacgatctcaacagggactcagaaagctgtgagtctctgaaagacagctttggttctggagatcgcaagagaagcaacattgatagcaatgagcatcaccaccacggaattaccaccatccgcgtcaccccagtagagggcagcgaaattggctcagagacgctgtccatttcttcttcccgcgactccaccctgcggagaaagggcaatatcattctaatccctgaaagaagcaacagccccgaaaacactagaaatatcttctacaaaggaacctcccccacacgggcttataaggattgagtgatgtccattccatcattagggctactcgcaaaagaccatatgttgattctacctgtgttctgttccagcgaattgggaagtctcaccaagctagattgtctaccatcagcccagaactctgtaacttttcagaactgctatactcaaacttgcagatctcacatcaaggagagggaaaagcacaatgcaagaacctaactaacgtgatgatatgaagagttttcttaagacctgtcgtcaaacttaaaaggttttgcagagggcagtatcaaaagaaagtggttttcttcaaatgtatactattttacttcctgaatgtgccaactttggggatttttctttatagtgagctgtgggaacccagaacacacacgttttccctacagcagaggccatgcagtattatatattcattttgcagaatctgcacctacagctcaatacgggtggtgctgattattatagtacatataccatgtaaactctcaaactctatttagctgtgaaatagtggtgtgcaattccttgttaaagaaatgctactttattaagaagatgctggctgctttgtgttagaataggacaccccgcagcttctctgtagtggctctgtcacagtcaaaaaatgaaaaggtttttgtgcgtttcttcaaaattctgctttcttcaacatcaaaaattgtgtagaaatattttcagtgaaagggaataactagtacttttctgcatagtttttcttctgcttactttttatttaagtataggtactgctaatgaatctgttttcttagtgagtaaatttgcataattttataaatattattttagagaatcttttgaaattgttgtgatcatattttgctttctatggcttctccttaacttattgattaattttttgaagttatagatatgttctcctattttaaaagcaaaaataacaattgacattccttgagcaaaatatactgctgtgaatttgcaaacaagaaatctgagccaaaacttgacattgtgggttacattgccagaaatgttggtcaagtttgcccttagatgtctacaactagctggcataggttgccatcttaacaagtaatctaaaagtcccattcggttctacattattaactttttttttctatatcctgatgaccagtaaattagagccacactggttaagtttgactcgtctctaaaacgtttttgttaattggacaccaagaggaagaatctgaaaaaaaaatgcatgttggtaagtaaaagtatctcacggtacaaattaagaatgactttcttcaaaatatctgaataggtgcagttttagtttaacatgcaaacaaccattgttgctacctatcctgaatcaagccttgagcctaaatcaaagcaaaccaataccattgataagaagaagataaaaacaaaatattttggagtgttttccaacttaaagtatgaagacatactcagttcttggaacttagtattaaaccttttttatgccatttcataagaattccgatatatacttgatgattgccaaggggatgaaaggaaacaacagagatggttgatctgatcttagctcactttccaataacagaaggagttgtttacagatgaatagtatcacatcattatcaatttccacatgaaaaaggtggagctttctagaaaaaccaacctctaaggcattaggaatttagctgaaaccagcagaattgaaaactctggcaataaaacatggactcaaccatatcccttctggcaatttccttctcagagaggggagtgggaataaaatgttgccttccccacttctcaccaccaccgccatcatgacgctcatactggcttttgcctgtttgtagaggaaaaggtgggctggttttagtactctgaaggacaaaaacaagcaaacaaaaacccctgctgcagcatttcaggtgcagtatgatatttcctaatctttcctatttcttaacaaaagattttaaagtacttctctagtcattgaagtttttttttctttacataaatattgatatattctttttctactcaaagtgccaaaggctacagtttttaatgacttaacaaattgtaccacattgttaaggacatataatgatagacactagaactcagacctctgcatgtatatttgataacatgtcttttgtaaaacaaaaattacaaaaaaatttgtttacattccactggtaccttaatttaaaataaatcagactaaaaggtggtatctcttcttagtgttctatttatcttatttgctaatgggagcacttcttcctttgttaggctgtgctttactgataaaaccaagtattgaataaagagagttaattatctttttaaagtaaataaaattatgaaaatatatatagtatatataaagtactgtgtttaaaaaaatgttatgcaatgttttccaaactgataaagtttgtaaagtgctataaatgtattttgttaagtacagataaaagctattgtgtgagtatattgtgctaaaatcatagaaataaagattagatttcttcatcaaaaaaaaaaaaaaaaaaaa

SEQ ID NO: 130 - DNA, 1652 bp, Homo sapiens
gtggcccggatgttcggtgcagctgccagatccgctgatctagtgcttctcgaaaaaaaccttcaggcggcccatggcatgccttggactttattgtgggaagaccctattatttaaaaatggctcaactgaaatatatggagaatgtggggtatgcccaagaggacagagaacgaatgcacagaaatattgtcagccttgcacagaatctcctgaactttatgattggctctatcttggatttatggcaatgcttcctctggttttacattggttcttcattgaatggtactcggggaaaaagagttccagcgcacttttccaacacatcactgcattatttgaatgcagcatggcagctattatcaccttacttgtgagtgatccagttggtgttctttatattcgttcatgtcgagtattgatgctttctgactggtacacgatgctttacaacccaagtccagattacgttaccacagtacactgtactcatgaagccgtctacccactatataccattgtatttatctattacgcattctgcttggtattaatgatgctgctccgacctcttctggtgaagaagattgcatgtgggttagggaaatctgatcgatttaaaagtatttatgctgcactttacttcttcccaattttaaccgtgcttcaggcagttggtggaggccttttatattacgccttcccatacattatattagtgttatctttggttactctggctgtgtacatgtctgcttctgaaatagagaactgctatgatcttctggtcagaaagaaaagacttattgttctcttcagccactggttacttcatgcctatggaataatctccatttccagagtggataaacttgagcaagatttgccccttttggctttggtacctacaccagcccttttttacttgttcactgcaaaatttaccgaaccttcaaggatactctcagaaggagccaatggacactgagtgtagacatgtgaaatgccaaaaacctgagaagtgctcctaataaaaaagtaaatcaatcttaacagtgtatgagaactattctatcatatatgggaacaagattgtcagtatatcttaatgtttgggtttgtctttgttttgtttatggttagacttacagacttggaaaatgcaaaactctgtaatactctgttacacagggtaatattatctgctacactggaaggccgctaggaagcccttgcttctctcaacagttcagctgttctttagggcaaaatcatgtttctgtgtacctagcaatgtgttcccattttattaagaaaagctttaacacgtgtaatctgcagtccttaacagtggcgtaattgtacgtacctgttgtgtttcagtttgtttttcacctataatgaattgtaaaaacaaacatacttgtggggtctgatagcaaacatagaaatgatgtatattgttttttgttatctatttattttcatcaatacagtattttgatgtattgcaaaaatagataataatttatataacaggttttctgtttatagattggttcaagatttgtttggattattgttcctgtaaagaaaacaataataaaaagcttacctacaaaaaaaaaaaaaaaaaaaaaaaaaaaaaa

SEQ ID NO: 131 - DNA, 3745 bp, Homo sapiens
ggcggcggcgacgcggggccggcggccgtgcggtgccgggagggcggctgggcaggcggcaggatgctgcgcgccgccctgtccctgctcgcgctgcccctggcgggggcggccgaagagcccacccagaagccagagtccccgggcgagcctcccccaggcttagagctcttccgctggcagtggcacgaggtggaggcgccctacctggtggccctgtggatcctggtggccagtctggccaaaatcgtgtttcacctgtctcggaaagtaacatctctggtccctgagagctgcctgctgattttgctgggcctggtgctagggggaattgttttggctgtggccaagaaagctgagtaccagctggagccaggcaccttcttcctcttcctgctgcctcctattgtgttggactcaggctatttcatgcctagcaggctgttctttgacaacttgggtgccatcctcacctatgccgtggtaggcacactctggaatgccttcacaacaggcgctgccctctggggcttgcagcaggctggacttgtagcccctagggtgcaggctggcttactggacttcctgctgtttgggagcctcatctcggcggtggaccccgtggccgtgctagctgtctttgaggaggtgcacgtcaatgagactctctttatcatcgtctttggcgagtccctgctcaacgatgctgtcaccgtggtgctgtacaaggtctgcaactcctttgtggagatgggctctgccaatgtgcaggccactgactacctgaagggagtcgcctccctgtttgtggtcagtctgggcggggcagccgtgggcttagtctttgccttcctcctggccctgaccacacgcttcaccaagcgggtccgcatcatcgagccgctgctggtcttcctcctcgcctacgcagcctacctcactgctgaaatggcctcgctctccgccattcttgcggtgaccatgtgtggcctgggctgtaagaagtacgtggaggccaacatctcccataagtcacgcacaactgtcaaatatacaatgaagactctagccagctgtgctgagaccgtgatcttcatgctgcttggcatctcagccgtggactcttctaagtgggcctgggattctgggctggtgctgggcaccctcatcttcatcctgttcttccgagccctcggcgtagtcctgcagacctgggtgctgaatcagttccggctagtccctctggacaagattgaccaagtggtgatgtcctatgggggcctgcggggggctgtggcctttgctctcgtcatcctactggataggaccaaggtccctgccaaggactactttgtagccaccactattgtagtggtcttcttcacagtcatcgtgcagggcttgaccatcaagccactggtcaaatggctgaaggtgaagaggagtgagcatcacaaacccaccctgaaccaggagctgcatgaacacacttttgaccacattctggctgcagtggaggacgttgtggggcaccatggctaccactactggagggacaggtgggagcagtttgacaagaaatacctgagtcagctgctgatgcgacgatcagcctaccgcatccgggaccagatctgggatgtgtactacaggcttaacatccgggatgccatcagctttgtggaccagggaggccacgtcttgtcttccacaggtctcactctgccttctatgcccagccgcaattctgtggcagaaacttctgtcaccaacctgctgagggagagtggcagtggagcgtgtctggatctgcaggtgattgacacagtacgcagcggccgggatcgtgaggatgctgtgatgcatcatctgctctgcggaggcctctacaagccgcgccgtaggtacaaagccagctgcagtcgccacttcatctcagaggatgcgcaggagcggcaggacaaggaggtcttccagcagaacatgaagcggcggctggagtcctttaagtccaccaagcacaacatctgcttcaccaagagcaagccacgaccccgcaagactggccgcaggaagaaggatggtgtggcgaatgctgaggctacaaatgggaaacatcgaggcctgggctttcaggacacagctgctgtgatattaaccgtggagtctgaggaggaggaggaggagagcgacagttcagagacagagaaggaggacgatgaggggatcatctttgtggctcgtgccaccagtgaggttctccaagagggcaaggtctcaggaagccttgaggtgtgcccaagcccacgaatcattcccccctccccaacctgtgcagaaaaggagctcccctggaagagtgggcagggggacctggcagtgtacgtgtcctcggaaaccaccaagattgtgcctgtggacatgcagacgggttggaaccagagcatctcatccctggagagcctagcgtcccctccctgtaaccaggccccaattctgacctgcctgcctccccatccacggggcactgaagagccccaggtccctctccacctaccttctgatccacgctctagcttcgccttcccaccgagcctggccaaggctggccgctctcgcagtgagagcagcgctgacctcccccagcagcaggagctgcagcccctcatgggccacaaggaccacacccatctcagcccaggcaccgctacctcccactggtgcatccagttcaacagaggcagccggctgtagctcaaggcctcggggaggagcaggaggtggaatccctgtgggaagtgctccctgggtgatgggtagagccctcgaaacttgacatggggccagaagggcctgggttgaagtagtaattgggcttccttggagctagtcagaggggtcacctaagctggtcctcacaggggcctttctcaccacctccctgctcctaacccctgccactttctgtttcattaaggcctctactctggctcaggacccagtccaggccttctacgggctaggcccagagacttgggttgctggtcccccttccctagtgggttttcccggggactctataggcagctgctcctgcccgcaaagcaagagcatcattcctattcttcagtggatgccagccttccctgccccaactccctccccagcactgggtcagtggtgtcctggcagtgaggctccgtgaggggctggcccttagaggaactggggtgggaggtggggcaggcctcacccttgggctttgctgccctgttgggtcagctacccatagtccatttttttagggcagtgggaacctctgcctccacttcctgctttagccccttccctttgctgccaggtattggggtaatatttcctccttttccaagaccaaggccaagaggctgggccaggcttcagttcaggcctgttgcttaactggggtcaccctgggatctgctgctctgggtctaagtctagacctttctgatccttgggtctgggttttttgaggaggggacatagtggcctctgggctgccatgtcaccacctgaacattccccaaacagagaaggaacccagcatctcagggccactgctccattgctctgggggctgggatgcctggctaagcaggggctgacagggtggcaggtgactttctagggatcagcacctgccctgtgttttgtaccttgaacctaagatatattaaacatctctcagatggaaaaaaaaaaa

SEQ ID NO: 132 - DNA, 548 bp, Homo sapiens
ggggacagcaacttccttgatccctgccacgcacgactgaacacagacagcagccgcctcgccatgaagctgctgatggtcctcatgctggcggccctcctcctgcactgctatgcagattctggctgcaaactcctggaggacatggttgaaaagaccatcaattccgacatatctatacctgaatacaaagagcttcttcaagagttcatagacagtgatgccgctgcagaggctatggggaaattcaagcagtgtttcctcaaccagtcacatagaactctgaaaaactttggactgatgatgcatacagtgtacgacagcatttggtgtaatatgaagagtaattaactttacccaaggcgtttggctcagagggctacagactatggccagaactcatctgttgattgctagaaaccacttttctttcttgtgttgtctttttatgtggaaactgctagacaactgttgaaacctcaaattcatttccatttcaataaactaactgcaaatctaaaaaaaaaaaaaaaaaaaaaaaaaaaaaa

SEQ ID NO: 133 - DNA, 2353 bp, Homo sapiens
gctcctccccggcagcggcggcggctcggagcgggctccggggctcgggtgcagcggccagcgggcgcctggcggcgaggattacccggggaagtggttgtctcctggctggagccgcgagacgggcgctcagggcgcggggccggcggcggcgaacgagaggacggactctggcggccgggtcgttggccgcggggagcgcgggcaccgggcgagcaggccgcgtcgcgctcaccatggtcagctactgggacaccggggtcctgctgtgcgcgctgctcagctgtctgcttctcacaggatctagttcaggttcaaaattaaaagatcctgaactgagtttaaaaggcacccagcacatcatgcaagcaggccagacactgcatctccaatgcaggggggaagcagcccataaatggtctttgcctgaaatggtgagtaaggaaagcgaaaggctgagcataactaaatctgcctgtggaagaaatggcaaacaattctgcagtactttaaccttgaacacagctcaagcaaaccacactggcttctacagctgcaaatatctagctgtacctacttcaaagaagaaggaaacagaatctgcaatctatatatttattagtgatacaggtagacctttcgtagagatgtacagtgaaatccccgaaattatacacatgactgaaggaagggagctcgtcattccctgccgggttacgtcacctaacatcactgttactttaaaaaagtttccacttgacactttgatccctgatggaaaacgcataatctgggacagtagaaagggcttcatcatatcaaatgcaacgtacaaagaaatagggcttctgacctgtgaagcaacagtcaatgggcatttgtataagacaaactatctcacacatcgacaaaccaatacaatcatagatgtccaaataagcacaccacgcccagtcaaattacttagaggccatactcttgtcctcaattgtactgctaccactcccttgaacacgagagttcaaatgacctggagttaccctgatgaaaaaaataagagagcttccgtaaggcgacgaattgaccaaagcaattcccatgccaacatattctacagtgttcttactattgacaaaatgcagaacaaagacaaaggactttatacttgtcgtgtaaggagtggaccatcattcaaatctgttaacacctcagtgcatatatatgataaagcattcatcactgtgaaacatcgaaaacagcaggtgcttgaaaccgtagctggcaagcggtcttaccggctctctatgaaagtgaaggcatttccctcgccggaagttgtatggttaaaagatgggttacctgcgactgagaaatctgctcgctatttgactcgtggctactcgttaattatcaaggacgtaactgaagaggatgcagggaattatacaatcttgctgagcataaaacagtcaaatgtgtttaaaaacctcactgccactctaattgtcaatgtgaaaccccagatttacgaaaaggccgtgtcatcgtttccagacccggctctctacccactgggcagcagacaaatcctgacttgtaccgcatatggtatccctcaacctacaatcaagtggttctggcacccctgtaaccataatcattccgaagcaaggtgtgacttttgttccaataatgaagagtcctttatcctggatgctgacagcaacatgggaaacagaattgagagcatcactcagcgcatggcaataatagaaggaaagaataagatggctagcaccttggttgtggctgactctagaatttctggaatctacatttgcatagcttccaataaagttgggactgtgggaagaaacataagcttttatatcacagatgtgccaaatgggtttcatgttaacttggaaaaaatgccgacggaaggagaggacctgaaactgtcttgcacagttaacaagttcttatacagagacgttacttggattttactgcggacagttaataacagaacaatgcactacagtattagcaagcaaaaaatggccatcactaaggagcactccatcactcttaatcttaccatcatgaatgtttccctgcaagattcaggcacctatgcctgcagagccaggaatgtatacacaggggaagaaatcctccagaagaaagaaattacaatcagaggtgagcactgcaacaaaaaggctgttttctctcggatctccaaatttaaaagcacaaggaatgattgtaccacacaaagtaatgtaaaacattaaaggactcattaaaaagtaaaaaaaaaaaaaaaaaaaaaaaaaaaaaaaaaaaa

SEQ ID NO: 134 - DNA, 2543 bp, Homo sapiens
gaggcgggcaaggcgggcgccgaggtttgcaaaggctcgcagcggccagaaacccggctccgagcggcggcggcccggcttccgctgcccgtgagctaaggacggtccgctccctctagccagctccgaatcctgatccaggcgggggccaggggcccctcgcctcccctctgaggaccgaagatgagcttcctcttcagcagccgctcttctaaaacattcaaaccaaagaagaatatccctgaaggatctcatcagtatgaactcttaaaacatgcagaagcaactctaggaagtgggaatctgagacaagctgttatgttgcctgagggagaggatctcaatgaatggattgctgtgaacactgtggatttctttaaccagatcaacatgttatatggaactattacagaattctgcactgaagcaagctgtccagtcatgtctgcaggtccgagatatgaatatcactgggcagatggtactaatattaaaaagccaatcaaatgttctgcaccaaaatacattgactatttgatgacttgggttcaagatcagcttgatgatgaaactctttttccttctaagattggtgtcccatttcccaaaaactttatgtctgtggcaaagactattctaaagcgtctgttcagggtttatgcccatatttatcaccagcactttgattctgtgatgcagctgcaagagggggcccacctcaacacctcctttaagcactttattttctttgttcaggagtttaatctgattgataggcgtgagctggcacctcttcaagaattaatagagaaacttggatcaaaagacagataaatgtttcttctagaacacagttacccccttgcttcatctattgctagaactatctcattgctatctgttatagactagtgatacaaactttaagaaaacaggataaaaagatacccattgcctgtgtctactgataaaattatcccaaaggtaggttggtgtgatagtttccgagtaagaccttaaggacacagccaaatcttaagtactgtgtgaccactcttgttgttatcacatagtcatacttggttgtaatatgtgatggttaacctgtagcttataaatttacttattattcttttactcatttactcagtcatttctttacaagaaaatgattgaatctgttttaggtgacagcacaatggacattaagaatttccatcaataatttatgaataagtttccagaacaaatttcctaataacacaatcagattggttttattcttttattttacgaataaaaaatgtatttttcagtatccttgagatttagaacatctgtgtcacttcagataacattttagtttcaagtttgtatggtagtgtttttatagataagatacgtctattttttcaaaattcatgattgcagtttaaatcatcatatgacgtgtgggtgggagcaaccaaagttatttttacagggactttattttttgatctttatttgagattgttttcatatctatctaaattattaggagtgtgtgtatcagaagtaattttttaatgtcttctaaggatggtcttccaggcttttaaactgaaaagcttaattcagatagtagcttttggctgagaaaaggaatccaaaatattaataaatttagatctcaaaaccactatttttattatttcattatttttcagaggccttaaaattctggataagagaatggaggaaaatactcagagtacttgattattttatttccttttattaaaaaattacttctatgtttttattgtctcttgagccttagttaagagtagtgtagaaatgcatgaacttcatcctaataaggataaaacttaaggaaaaccacaataaaccatgaaggtgtacacatcctataacacagataaagttttggtgtgctacctattcttgagagagtgagtgagtgtatgtgtttaaaggaaacaaaatgggagaaataagttttaaaaaaatcctcattttgttaatattcaaaagatggactgagcttccacttgggttttatcttgttttaattgtttttgtatcaaaacttgaaattcctctatttctattgggatataaaagccttccccttcagtgaagaaaacatttattttttatttgattcctaggatttagtaaactctagctgtctatttaaaatgtactgaggcacaacaagtattatactggaagacttgccaaactggcaaagctttaagttcatcagcattctatgtggttcagagctgtgatttttgcaaagtattttaccaacctcctcgatggctttgataaaggttagatttgatgttttttttttagatttatttttcttactccactaaactataaagaaaataattacttagaaactccattttaaataatcatttcctagaaattcttaaatatatacagaattttaaagaaaacatttcatctgatttagttagcatccacatatcattgaggaattaaagtgtgggacagtcattatt

SEQ ID NO: 135 - DNA, 6147 bp, Homo sapiens
gcgggcgccggcaatcgagtggcttcctggccatggagaggagatctggacccgaggacgccagggactcctctccgtctccctggaccgctgtgtaggcacctgagttaacggacgctaagcggggtaggggaagtaacagtgtatcatgtatgccactgattccaggggacactcccctgctttcctccaacctcagaatggaaatagtcgtcacccatctggctatgttccagggaaggttgtcccattgcgtccccctcctcctccaaagagtcaagcttcagccaaatttacctccatcagacgagaagaccgggcaaccttcgcattctcacctgaagaacagcaagcccagagagaaagtcaaaagcaaaagagacacaaaaatactttcatttgttttgctattactagtttctcattttttattgcacttgcaatcattttaggaatatcctcaaaatatgctccagatgaaaattgcccagatcaaaatcctcgtctcaggaattgggatccaggacaagattctgcaaagcaagttgttatcaaggagggagatatgctccgtctgacctcagacgccaccgtgcattctatagtcattcaggatggaggactgcttgtatttggggacaataaagatggatccagaaatattactttgaggactcattacatcctgatccaggatggtggggcgcttcatattggagcagaaaaatgccgctataaatccaaagcgacaattaccttgtatggcaagtcagatgaaggtgaaagtatgccaacatttggcaaaaagtttattggtgtggaagctggcgggacactggagttacatggggcacggaaggcatcgtggacgttgttggcaaggaccctgaattcctcaggcttgccctttgggtcctatacctttgaaaaggacttttcccggggcctcaatgtgagggtcattgaccaagacacggccaaaattttggaaagtgagagatttgatacccatgaataccgcaatgagagcaggcggcttcaggagtttctgagattccaggatccaggtcggattgttgccatagctgtcggggattcagccgctaaaagtctcttacaaggaaccatccagatgatccaggaacggttgggaagtgaactgatccaaggactgggctacaggcaagcttgggctttagttggtgtcattgatggtggaagcacttcttgcaatgaatccgtgagaaactatgaaaatcatagcagtggcgggaaggctcttgcccaaagagaattttatactgtggatggccagaagttctctgtgacagcttatagtgaatggattgaaggcgtttctctttcaggattccgggtagaggttgtagatggagtgaagctaaatttgctagatgatgttagtagttggaaacctggagaccagattgtggtcgcaagcacagactattccatgtaccaagcagaggagttcactcttcttccctgttctgaatgcagccattttcaggtcaaagtcaaagaaacccctcagttcctgcacatgggtgagatcatagacggtgtagacatgagagctgaggttggaattcttacccggaatattgtgatccaaggagaagtggaggactcatgctacgcagaaaatcagtgccaattttttgattatgatacctttgggggacacattatgataatgaaaaattttacttcagtccatctttcttatgtggaattgaaacacatgggtcagcagcagatggggcgataccctgttcattttcacctgtgtggtgacgtggattataaaggaggatacagacatgcaacatttgtggacggcctgtctattcatcacagcttctcaaggtgcatcactgtgcatgggacaaatggcttgctaataaaagacaccattgggtttgacacactaggtcattgtttctttttggaagatggtattgaacagaggaatactttgttccacaatctgggactcctcaccaagccgggtactctcctgcccaccgataggaacaactccatgtgtaccaccatgcgagataaagtgtttggaaattacattcctgtgcctgctactgactgtatggctgtttcaactttctggattgctcatcccaacaataatctgattaataatgcagctgcaggctcacaggatgctggaatatggtatttattccacaaggaaccaactggggaatccagtggattgcagctcttggcaaaaccagaactcactccattgggtatattttataacaacagggtccattcaaattttaaggctggcttatttattgacaaaggtgtcaaaacaaccaactctagtgctgctgacccaagggaatacctctgtttggacaatagtgcaagatttcgacctcatcaggatgcaaaccccgaaaaaccacgtgttgctgctctaattgacaggctcattgcttttaaaaataatgataatggagcttgggtcagaggaggagatattatcgttcaaaattcagcatttgcagataatggaataggactgacctttgccagtgatggaagcttcccaagtgatgaaggttccagccaagaggtatctgaatctctctttgttggggagagcaggaattacggctttcagggtggtcagaacaagtatgtaggcactggaggaatagaccagaagcctcgaacattacccaggaacaggacgttcccaattagaggctttcagatttatgatgggcccattcatctcacaaggagcactttcaaaaaatatgtgccaactccagataggtacagcagtgcaattggcttcctcatgaagaattcctggcagataacccccaggaataatatctccctcgtgaagtttggtccacatgtctctctgaatgtcttttttggaaagcctggtccctggtttgaagattgtgagatggatggtgataagaactccatattccatgacattgatggctctgtgacaggatacaaggatgcttatgtgggaagaatggacaactacctgatccgccatccaagctgtgtaaatgtgtctaagtggaatgcagtgatctgcagtgggacctatgcacaggtctatgtacagacatggagcactcagaatctttctatgaccattacacgagatgagtatccgtccaaccctatggtgctccgaggtattaatcagaaggctgcctttccacagtaccagcctgtcgtcatgctggagaagggttataccatccactggaatgggccggcaccacggactacatttctatacctcgtcaacttcaacaagaatgactggattcgagttggcctttgctatccatcaaacacaagttttcaagttacctttggctatttgcagcggcagaatggctcattatccaaaatcgaagaatatgagcctgtgcattcactggaagaactgcaaagaaagcaatccgagaggaaattctattttgactccagcacggggttactgtttttgtatctcaaagccaaaagccacaggcatggccacagttactgttcatctcagggatgtgaaagagtcaagatccaagcagccacagactcaaaggacatcagtaactgcatggccaaagcatacccacagtactacagaaagccgtcagtggtcaagcggatgccggccatgctcactggactctgtcaaggctgtggcactcggcaggtggtgtttactagtgatcctcataaaagttacctccctgtgcaattccagtcacctgataaagcagaaacccagcgtggagacccgtctgttatttctgtcaatggcactgactttaccttccgaagtgcaggcgtcctcctccttgttgtggatccgtgcagcgttccattccgcttgacggaaaaaacggtttttcctcttgctgatgtcagtcgcattgaagagtatttaaaaacaggcatccctccaaggtccattgttctgttgagcacaagaggagaaataaagcagttaaacatttcacacttactagtacctctgggattagccaaaccagctcatctttatgacaaagggagtaccatatttttgggattcagtggaaactttaaaccatcatggactaagctatttaccagtcctgctggacagggccttggggtgcttgaacaattcatacctttgcagctggacgaatatggttgtcccagagccaccactgtccgcagaagagacctggaactgctaaagcaagcttcaaaagcacattagagactaactgtaacttaagtgctgggggaaaaaaaatgtgaactaacttatttaatttatggcattttaaaatgacactgttaacccaacggaaccattttccagtttgatacagaatggggagaaaagaaagcgtttgaaattattgcttggataccagcttcatgcaccttctagttgtacaaaatgttaaagacgttgtttgtatttgtaaggctggtgtattcagagagcagatctcttattcctcactttccacccccgtattttgtaatgaccatgagcaatgtttttactttttgtataatggggtggggtggagtgggggcttctgagagtcagcctgaggtctttagaggaccagctattgtagcaccttggatacttgaagtttaatgctcagttgggtcgggtggcagttgacttggtggctggcatgttcagcagtgcctggggccctgtttctgggcagcctttgaggattttctatgatattgaatgacagttttaagtggcaactcaggcccagctcatgcccttttttgcctggacatgtgctatttttattcacttatatatcaattacttgtaagggttaaactttcaaacaggaagtatattgggacaaaagggctcttggggattagatatccctttaatctgtgaccatggggcaaaaaattttcctgcagcaaaagtctgaggctgttgggaccatttttgcagctttaatccttagcctcttttgactgtatatttgtgtttaaaatgcagagctcaactgaatatttccttttttgttttgttttgttttgttttaagaagtaggttgttttcctgaaccgtaaacttgtatcattttaacttgcacaaaggaagtctgttcttggtattgctcttgcacttgggttttttgttattgttttgtgtggattttttaaagcttttctgttcaccctcctgccaggaaaatcccagaaagcttaatgataccccaaaatgattacacccagggaggaaaaaaaggagcgctttctagggtcagaatcgtggagagaatactcagaacatgaacctctttaaagccttgcaggaatgagtcactcttacttaatgaaatgttaaagccaattaaaaagcatgctgtgatgcccagcttccctttccacagggtgcatgcgtctcctgctggtgaatcacatgcggcaagaggcaactggctccacagcctgggatgctgccgtaccaagaggaaagaagcagcaaaatgcctttacgttgttctaaacccccgacgcataaagtgtagaggagggatggccaagggtgggtggtagaaagtgtgttcaggctgacactggcaatgagtacagataatttcactttcctcttccaggggcaaaggctgatggcctctacctttgtatccaggagaaactgcagagcagccctgtgactttacaaaatatgctacctcaaagtgctaccgataaacctttctaattgtaagtgcccttactaagggcacatgtcttaatcaaagttagttttttgttttctggtttgttttttttttttttgtatattgatgaatgagatcttacctattaaatatattattggaaaaaaaaaaaaaaaaaaaattaaagtttgagtgtgtgtgtgtgtgtgtgtgtgtgtgtgtgtgtgtgtgttttatgacttaaatatctttacgtgtgttttttagagcttggttctttaaagatttggagaagatatgtaaattaccaaggcacttggtttttctgttttatatactaataatcagggcctaagttaaataaaaatatgtgtgcatgtatttt

SEQ ID NO: 136 - DNA, 2728 bp, Homo sapiens
atcttggcttcccggggaaaggcggcgtgaggggaagaagttgtagggtgggggcaggagtgaggaggagggaagagagagggggaggaggccgcggcggggcagggcggggactgcctgcctgcctgggttgcggaagtgatagccgccgaccgagcctgctgctttcttgctactgcttcggcttcccggctaccccccggacggtgaaggcggcccagctgtggatggtcagatagcccttgtttcccgccgccaatctctggcccatagcagcacggagcagacggcggcagcagcagcagcaggcgaggaggaagatggcgggacggctgccggcctgtgtggtggactgtggcacggggtatacaaaactaggatatgctggaaatacagaaccacagtttatcatcccttcctgtattgctattaaggagtcagcaaaagtgggtgatcaagctcaaaggagggtgatgaaaggtgttgatgacctagacttcttcattggtgatgaagcaatagaaaaacctacatatgcaacaaagtggccaatccgccatggtatagttgaagattgggacttaatggaaaggtttatggagcaagtgatctttaaatatttaagggcagaacctgaagaccattattttcttttgactgaacctccattgaatactccagaaaacagggaatatactgctgaaataatgtttgagtccttcaatgttccaggcttgtacattgctgtgcaggctgttcttgccttagctgcatcttggacctcaagacaagtaggagaacggacgttgaccggtacggtaatagacagtggagatggtgtcactcatgtcattcctgtggctgaagggtatgtgattggcagctgtattaaacacattccaatcgcaggacgagatataacatattttattcagcaactgctgagagaccgagaagtaggaatccctccagaacaatccttggaaactgctaaggcagtaaaggagcgctatagttatgtctgcccagatttagtaaaagaatttaacaagtatgatacagatgggtcaaaatggattaaacagtatactggaatcaatgctatctcaaagaaagagttttctatcgatgttggttatgagagatttttgggacctgaaatcttttttcatccagagtttgctaatccagactttacacaacctatctcagaagttgtagatgaagtaattcagaattgtcctattgatgtcagacgtcctctctacaagaatattgtcctctctggaggttcaaccatgttcagggactttggacgtcgcttgcaaagagatttgaaaagaactgtagatgcccggctgaaattaagtgaggaattgagtggtggtagattgaagccaaaacctattgatgtacaagtcattacacaccacatgcagcgatatgcagtttggtttggaggatcaatgctggcttccacgcctgagttctaccaagtatgccacaccaaaaaggattatgaagaaattggacctagcatttgtcgtcacaatccagtgtttggagtcatgtcgtaaaattggcttcatagttattggggttagggaggtggggaagagataatctttctgattacctgttttgtctggatggctggttttgaggttttaaacctgacttgaaatagtaacaccaaacatgattatacaggaatattttaataagtgtatcaccatgcagatgtagaagagagcgaaagtgattgtgtttttctttagattgaatatttgaatcttatgtgtaacaaaaagaagtgggttttagttctttctgtgccctgatattttgtatattaatgaattatccaagattcgatgggatttatcagtgtgtagatagctctataatgcttgaattgtacacttctaagtgtgcagtgcaagagcttgtttatatttcatactttttatactttgaggaaaaaaagtcaaagaaaaattgtatttgagggaaaaaaccatgaccaagtaaaggataaattcaaaaaatagcctcatgagacttggcatacacactcgtgggattccagttattatggagtgcttccatccctctccaccccttccccccaaaaggttttctttgcaagtgcttttggaactaagagctagtatcttggattaactgatgcctgctagtgctttctgattactcgcattctgtttcttgctttaaaagaagagtaaagacaagagtgttggaccagtattgcagttctgtagtgtcatttcttataaaaaacaaaacaacaacaataatttatcaaaattggcatatttaaagcctaacattctaataaaggcacaaatttctttttaatacttgtttcagcctctttaatctctttataagttaactaataaatctattttcttcagacttctgcaatagttctttaaaatcacaacagttagcaagctgacttttgtaatgtgctcaatacaaatacttgtgaacttttaatatgttgagtgctttcattttgataactggatctccatttgatattttcatttgtataactcatttgcagtctgaaaattttttttagtgccagtccctgaacatatcattgaaagttaattttctttgcattttaaaatatctggattatgaagaaaaagtgatgaaaataaattaaaactgaattacaaaaaaaaaaaaaaaa

SEQ ID NO: 137 - DNA, 2484 bp, Homo sapiens
gccgggccgagcgcggagccatgggccgggctggcaccgggaccgggggcgaggcggtggccgcggtggtggcggggccgctgctgctgctgctgcttgcccggcccccgcctgcctccgccggctacagcgggaagagcgaggtggggctggtgtccgagcacttctcacaggccccgcagaggctgtccttctacagctggtatggcagtgccaggctcttccgcttccgcgtgcccccagatgctgtgcttctacgctggctcctgcaggtctcccgggagagcggcgctgcctgcaccgacgcggagatcaccgtgcacttccgttccggcgcccctccggtcatcaacccgctgggcaccagcttcccggacgacaccgcggtgcagccctccttccaggtcggggtgccgctgagcaccgcaccgagaagcaatgcctccgtcaacgtttcccacccggcccccggggactggttcgtggccgcccacctgcccccctcatcccagaagatcgagttgaagggcttggctcccacctgtgcctacgtcttccagcctgaactgctggtcacgcgggtggtcgagatttccatcatggagccggacgtgccccttcctcagaccctcctctcccatcccagctacctcaaggtctttgtccccgattacacgcgggagcttctgctggagctgcgggactgcgtgtccaatgggagcctgggctgccccgtgcgtctcaccgtgggcccggtcaccctgcctagcaacttccagaaggtgctcacctgcaccggtgccccctggccctgccgcctgctgctgccctcaccgccctgggaccggtggctgcaagtgacagctgagagcctggtggggcccctcgggacagtggctttcagtgctgtagctgccctcacagcttgcaggccacggagcgtgaccgtccagccccttctgcagagcagccaaaaccagagcttcaatgcctcctctggtctgctgtccccgagccccgaccaccaggacctgggcaggagtggcagggtggaccgcagccccttctgcctcacaaactacccagtcacgcgggaggacatggacgtggtgtcggtgcacttccagcccctggacagggtctcggtgagggtgtgttcggacacgccctccgtgatgcggctgcgcctgaacaccggcatggacagcgggggttccctcaccatctccctgcgggccaacaagacagagatgcggaacgagaccgtcgtagtggcctgcgtgaatgctgcctcgcccttccttggcttcaatacttcgctcaactgcaccacagccttcttccagggctaccctttgtctctgagcgcctggtctcgcagggccaacctcatcatcccctacccagagacagacaactggtacctctccctgcagctcatgtgccctgagaatgctgaggactgtgagcaggctgtggtccacgtggagaccaccttgtacctggtgccctgtttgaacgattgtggaccctatggccagtgcctcctgctccgcagacacagctacctgtatgccagctgcagctgcaaggcaggctggcgtgggtggagctgcacggacaacagcacagcccagacggtggcccagcagagggcggccacactgctgctcacgctcagcaacctcatgttcctggcccccatcgccgtctcagtgcggcgattcttcctggtggaggcctccgtctacgcctacaccatgttcttctccacgttctaccacgcctgcgaccagcccggggaggcggtgctgtgcatcctcagctacgacacgctgcagtactgcgacttcttgggctccggggcggccatctgggtcaccatcctgtgcatggcacggctcaagacagtcctgaaatacgtgctgtttcttctgggtacactggtcatcgccatgtccttgcagctggaccgcaggggcatgtggaacatgctggggccctgcctctttgccttcgtgatcatggcctccatgtgggcttaccgctgcgggcaccggcgccagtgctaccccacctcgtggcagcgctgggccttctacctcctgcccggcgtctctatggcctctgtgggcatcgccatctacacctccatgatgactagcgacaactactactacacccacagcatctggcacatcctgctggccgggagcgcagccttgctgctgccgccacctgaccagcccgccgagccctgggcctgctcgcagaaattcccctgccactatcagatctgcaagaacgatcgggaggaactgtacgcagtgacgtgacactggcctggggacagctgctgctctgatgacctcttcagccaggagctgtatcgagggggaggcgcctggtccagccctggacagattgatttccagctgaataaattggcctagataccaaaaaaaaaaaaaaaaaaaaaaaaaa

SEQ ID NO: 138 - DNA, 2043 bp, Homo sapiens
cgcctgcaggtcggccatggccagtacggttagccccagcaccatagctgagaccccagagccacctccattgtctgaccacatccgaaatgctgctgacatctcagtcattgtcatctattttctggtggtgatggctgttgggctgtgggcgatgctgaagaccaaccgaggtactataggaggcttcttcctcgctggtcgtgatatggcctggtggccgatgggcgcctctctctttgccagtaacatcggcagcaaccactatgtggggctggctgggacaggagcagcttcaggagtcgccaccgtaacatttgaatggacttcctcagtaatgttgctgattcttgggtggatctttgtccctatctacatcaagtcgggggtgatgaccatgccggaatatctcaagaagcggtttggtggggagcgactccaggtctacctctccatcctctccctcttcatctgtgtggttttgttaatttctgcagacatatttgctggagccatattcatcaagctggccttgggattggacctttacctggcaatcttcatcctcttggctatgactgctgtttacaccaccactgggggcttggcctcggtgatttacacagacaccctccagaccatcatcatgctgattggctcttttattctcatggggtttgcatttaacgaagttggaggttatgagagctttaccgagaagtacgtgaatgccaccccatccgtagtcgagggggacaacttgacaatcagtgccagttgctacacacctcgggcggactccttccatatcttccgagatgctgtgactggggacattccatggccaggaattatatttggaatgcccattacagctttgtggtactggtgcacaaatcaggtcattgtgcagcgctgcctgtgtggcaaggacatgtctcacgtgaaggccgcttgcattatgtgtgcttacctgaagctgctgcccatgttcctcatggtgatgccggggatgatcagccgcatcctgtacacagatatggtagcatgtgtggtaccttctgaatgcgtgaaacactgtggcgttgatgttggctgcaccaactacgcataccccacgatggtgctggaactgatgccccaaggactgcgaggcctgatgctttcggtcatgctggcctctctcatgagctccctgacctccatcttcaacagcgccagcaccctcttcaccattgacctctacaccaagatgcggaagcaagcgtcggagaaagagctcctgatagctggacggatatttgttcttctattaactgttgtgagcattgtgtgggtcccactggtacaagtttctcaaaatggacaactaatccattacacagaatcaatttctagctaccttgggcctccaattgcagctgtctttgtgcttgccatcttctgtaaaagagtcaatgaacagggagcattctggggtctaatggttggacttgcaatgggcctcattcgtatgataacagagtttgcttatggaacagggagttgcttggctcccagtaactgtcccaagattatctgtggagtgcactatctgtacttttccatcgttctcttttttgggtccatgctggtcaccctgggaatttccctcttaacaaaacccattcctgatgtacatctgtaccgcctgtgctgggttcttcggaacagtacagaggagcgaatcgatatagatgcagaagagaaaagtcaggaagaaacagatgatggtgttgaagaagattatcctgagaaatcacgtggatgcctcaagaaagcttatgacttgttctgcggtttgcagaagggacccaagctaaccaaggaggaggaggaagccttgagcaagaagctcacagacacgtctgagaggccctcgtggaggacaatagtgaacatcaacgccatcctcctcctggctgtggtggtctttattcacggctactatgcctgaactctatctgagccattagaataatgaataattcttaaaaaaaaaaa

SEQ ID NO: 139 - DNA, 2507 bp, Homo sapiens
cagcacaccccggcacctcctctgcggcagctgcgcctcgcaagcgcagtgccgcagcgcacgccggagtggctgtagctgcccggcgcggcgccgccctgcgcgggctgtgggctgcgggctgcgcccccgctgctggccagctctgcacggctgcgggctctgcggcgcccggtgctctgcaacgctgcggcgggcggcatgggataacgcggccatggtgcgccgagatcgcctccgcaggatgagggagtggtgggtccaggtggggctgctggccgtgcccctgcttgctgcgtacctgcacatcccaccccctcagctctcccctgcccttcactcatggaagtcttcaggcaagtttttcacttacaagggactgcgtatcttctaccaagactctgtgggtgtggttggaagtccagagatagttgtgcttttacacggttttccaacatccagctacgactggtacaagatttgggaaggtctgaccttgaggtttcatcgggtgattgcccttgatttcttaggctttggcttcagtgacaaaccgagaccacatcactattccatatttgagcaggccagcatcgtggaagcgcttttgcggcatctggggctccagaaccgcaggatcaaccttctttctcatgactatggagatattgttgctcaggagcttctctacaggtacaagcagaatcgatctggtcggcttaccataaagagtctctgtctgtcaaatggaggtatctttcctgagactcaccgtccactccttctccaaaagctactcaaagatggaggtgtgctgtcacccatcctcacacgactgatgaacttctttgtattctctcgaggtctcaccccagtctttgggccgtatactcggccctctgagagtgagctgtgggacatgtgggcagggatccgcaacaatgacgggaacttagtcattgacagtctcttacagtacatcaatcagaggaagaagttcagaaggcgctgggtgggagctcttgcctctgtaactatccccattcattttatctatgggccattggatcctgtaaatccctatccagagtttttggagctgtacaggaaaacgctgccgcggtccacagtgtcgattctggatgaccacattagccactatccacagctagaggatcccatgggcttcttgaatgcatatatgggcttcatcaactccttctgagctggaaagagtagcttccctgtattacctcccctactcccttatgtgttgtgtattccacttaggaagaaatgcccaaaagaggtcctggccatcaaacataattctctcacaaagtccactttactcaaattggtgaacagtgtataggaagaagccagcaggagctctgactaaggttgacataatagtccacctcccattactttgatatctgatcaaatgtatagacttggctttgttttttgtgctattaggaaattctgatgagcattactattcactgatgcagaaagacgttcttttgcataaaagacttttttttaacactttggacttctctgaaatatttagaagtgctaatttctggcccacccccaacaggaattctatagtaaggaggaggagaaggggggctccttccctctcctcgaatgacgttatgggcacatgccttttaaaagttctttaagcaacacagagctgagtcctctttgtcatacctttggatttagtgtttcatcagctgtttttagttataaacattttgttaaaatagatattggtttaaatgatacagtattttaggtatgatttaagactatgatttacctatacattatatatattttataaagatactaaaccagcatacccttactctgccagagtagtgaagctaattaaacacgtttggtttctgaataaattgaactaaatccaaactatttcctaaaatcacaggacattaaggaccaatagcatctgtgccagagatgtactgttattagctgggaagaccaattctaacagcaaataacagtctgagactcctcatacctcagtggttagaagcatgtctctcttgagctacagtagaggggaagggattgttgtgtagtcaagtcaccatgctgaatgtacactgattcctttatgatgactgcttaactccccactgcctgtcccagagaggctttccaatgtagctcagtaattcctgttactttacagacaggaaagttccagaaactttaagaacaaactctgaaagacctatgagcaaatggtgctgaatactttttttttaaagccacatttcattgtcttagtcaaagcaggattattaagtgattatttaaaattcgtttttttaaattagcaacttcaagtataacaactttgaaactggaataagtgtttattttctattaataaaaatgaattgtgacaaaaaaaaaaaaaaaaaaaaaaaaaaaaaaaaaaaaaaaaaaaaaaaaaa

SEQ ID NO: 140 - DNA, 1644 bp, Homo sapiens
ccggctcagcctctcacttgtcagaggccggggaagagaagcaaagcgcaacggtgtggtccaagccggggcttctgcttcgcctctaggacatacacgggaccccctaacttcagtcccccaaacgcgcaccctcgaagtcttgaactccagccccgcacatccacgcgcggcacaggcgcggcaggcggcaggtcccggccgaaggcgatgcgcgcagggggtcgggcagctgggctcgggcggcgggagtagggcccggcagggaggcagggaggctgcagagtcagagtcgcgggctgcgccctgggcagaggccgccctcgctccacgcaacacctgctgctgccaccgcgccgcgatgagccgcgtggtctcgctgctgctgggcgccgcgctgctctgcggccacggagccttctgccgccgcgtggtcagcggccaaaaggtgtgttttgctgacttcaagcatccctgctacaaaatggcctacttccatgaactgtccagccgagtgagctttcaggaggcacgcctggcttgtgagagtgagggaggagtcctcctcagccttgagaatgaagcagaacagaagttaatagagagcatgttgcaaaacctgacaaaacccgggacagggatttctgatggtgatttctggatagggctttggaggaatggagatgggcaaacatctggtgcctgcccagatctctaccagtggtctgatggaagcaattcccagtaccgaaactggtacacagatgaaccttcctgcggaagtgaaaagtgtgttgtgatgtatcaccaaccaactgccaatcctggccttgggggtccctacctttaccagtggaatgatgacaggtgtaacatgaagcacaattatatttgcaagtatgaaccagagattaatccaacagcccctgtagaaaagccttatcttacaaatcaaccaggagacacccatcagaatgtggttgttactgaagcaggtataattcccaatctaatttatgttgttataccaacaatacccctgctcttactgatactggttgcttttggaacctgttgtttccagatgctgcataaaagtaaaggaagaacaaaaactagtccaaaccagtctacactgtggatttcaaagagtaccagaaaagaaagtggcatggaagtataataactcattgacttggttccagaattttgtaattctggatctgtataaggaatggcatcagaacaatagcttggaatggcttgaaatcacaaaggatctgcaagatgaactgtaagctcccccttgaggcaaatattaaagtaatttttatatgtctattatttcatttaaagaatatgctgtgctaataatggagtgagacatgcttattttgctaaaggatgcacccaaacttcaaacttcaagcaaatgaaatggacaatgcagataaagttgttatcaacacgtcgggagtatgtgtgttagaagcaattccttttatttctttcacctttcataagttgttatctagtcaatgtaatgtatattgtattgaaatttacagtgtgcaaaagtattttacctttgcataagtgtttgataaaaatgaactgttctaataaaaaaaaaaaaaaaaaaaa

SEQ ID NO: 141 - DNA, 10244 bp, Homo sapiens
gcagccatgagcggcagcagcggcggagccgccgcccccgccgcgtcctccggccccgccgcggcggccagcgcggctggctcgggctgcgggggcggtgccggcgagggggcagaggaggcggccaaggacctggccgacatcgcggccttcttccgatccgggtttcgaaaaaacgatgaaatgaaagctatggatgttttaccaattttgaaggaaaaagttgcatacctttcaggtgggagagataaacgtggaggtcccattttaacgtttccggcccgcagcaatcatgacagaatacgacaggaggatctcaggagactcatttcctatctagcctgtattcccagcgaggaggtctgcaagcgtggcttcacggtgatcgtggacatgcgtgggtccaagtgggactccatcaagccccttctgaagatcctgcaggagtccttcccctgctgcatccatgtggccctgatcatcaagccagacaacttctggcagaaacagaggactaattttggcagttctaaatttgaatttgagacaaatatggtctctttagaaggccttaccaaagtagttgatccttctcagctaactcctgagtttgatggctgcctggaatacaaccacgaagaatggattgaaatcagagttgcttttgaagactacattagcaatgccacccacatgctgtctcggctggaggaacttcaggacatcctagctaagaaggagctgcctcaggatttagagggggctcggaatatgatcgaggaacattctcagctgaagaagaaggtgattaaggcccccatcgaggacctggatttggagggacagaagctgcttcagaggatacagagcagtgaaagctttcccaaaaagaactcaggctcaggcaatgcggacctgcagaacctcttgcccaaggtgtccaccatgctggaccggctgcactcgacacggcagcatctgcaccagatgtggcatgtgaggaagctgaagctggaccagtgcttccagctgaggctgtttgaacaggatgctgagaagatgtttgactggatcacacacaacaaaggcctgtttctaaacagctacacagagattgggaccagccaccctcatgccatggagcttcagacgcagcacaatcactttgccatgaactgtatgaacgtgtatgtaaatataaaccgcatcatgtcggtggccaatcgtctggtggagtctggccactatgcctcgcagcagatcaggcagatcgcgagtcagctggagcaggagtggaaggcgtttgcggcagccctggatgagcggagcaccttgctggacatgtcctccattttccaccagaaggccgaaaagtatatgagcaacgtggattcatggtgtaaagcttgcggtgaggtagaccttccctcagagctgcaggacctagaagatgccattcatcaccaccagggaatatatgaacatatcactcttgcttattctgaggtcagccaagatgggaagtcgctccttgacaagctccagcggcccttgactcccggcagctccgattccctgacagcctctgccaactactccaaggccgtgcaccatgtcctggatgtcatccacgaggtgctgcaccaccagcggcagctggagaacatctggcaacaccgcaaggtccggctgcatcagaggctgcagctgtgtgttttccagcaggacgttcagcaggtgctagactggatcgagaaccacggagaagcatttctgagcaaacatacaggtgtggggaaatctcttcatcgggccagagcattgcagaaacgtcatgaagattttgaagaagtggcacagaacacatacaccaatgcggataaattactggaagcagcagaacagctggctcagactggggaatgtgaccccgaagagatttatcaggctgcccatcagctggaagaccggattcaagatttcgttcggcgtgttgagcagcgaaagatcctactggacatgtcagtgtcctttcacacccatgtgaaagagctgtggacgtggctggaggagctgcagaaggagctgctggacgacgtgtatgccgagtcggtggaggccgtgcaggacctcatcaagcgctttggccagcagcagcagaccaccctgcaggtgactgtcaacgtgatcaaggaaggggaggacctcatccagcagctcagggactctgccatctccagtaacaagaccccccacaacagctccatcaaccacattgagacggtgctgcagcagctggacgaggcgcagtcgcagatggaggagctcttccaggagcgcaagatcaagctggagctcttcctgcagctgcgcatcttcgagagggacgccatcgacattatctcagacctcgagtcttggaatgatgagctttctcagcaaatgaatgacttcgacacagaagatctcacgattgcagagcagcgcctccagcaccatgcagacaaagccttgaccatgaacaacttgacttttgacgtcatccaccaagggcaagatcttctgcagtatgtcaatgaggtccaggcctctggtgtggagctgctgtgtgatagagatgtagacatggcaactcgggtccaggacctgctggagtttcttcatgaaaaacagcaggaattggatttagccgcagagcagcatcggaaacacctggagcagtgcgtgcagctgcgccacctgcaggcagaagtgaaacaggtgctgggttggatccgcaacggagagtccatgttaaatgccggacttatcacagccagctcgttacaagaggcagagcagctccagcgagagcacgagcagttccagcatgccattgagaaaacacatcagagcgcgctgcaggtgcagcagaaggcagaagccatgctacaggccaaccactacgacatggacatgatccgggactgcgccgagaaggtggcgtctcactggcaacagctcatgctcaagatggaagatcgcctcaagctcgtcaacgcctctgtcgctttctacaaaacctcagagcaggtctgcagcgtcctcgagagcctggaacaggagtacaagagagaagaagactggtgtggcggggcggataagctgggcccaaactctgagacggaccacgtgacgcccatgatcagcaagcacctggagcagaaggaggcattcctgaaggcttgcacccttgctcggaggaatgcagacgtcttcctgaaatacctgcacaggaacagcgtgaacatgccaggaatggtgacgcacatcaaagctcctgaacagcaagtgaaaaatatcttgaatgaactcttccaacgggagaacagggtattgcattactggaccatgaggaagagacggctggaccagtgtcagcagtacgtggtctttgagaggagtgccaagcaggctttggaatggatccatgacaatggcgagttctacctttccacacacacctccacgggctccagtatacagcacacccaggagctcctgaaagagcacgaggagttccagataactgcaaagcaaaccaaagagagagtgaagctattgatacagctggctgatggcttttgtgaaaaagggcatgcccatgcggcagagataaaaaaatgtgttactgctgtggataagaggtacagagatttctctctgcggatggagaagtacaggacctctttggaaaaagccctggggatttcttcagattccaacaaatcgagtaaaagtctccagctagatatcattccagccagtatccctggctcagaggtgaaacttcgagatgctgctcatgaacttaatgaagagaagcggaaatctgcccgcaggaaagagttcataatggctgagctcattcaaactgaaaaggcttatgtaagagacctccgggaatgtatggatacgtacctgtgggaaatgaccagtggcgtggaagagattccacctggcattgtaaacaaagaactcatcatcttcggaaacatgcaagaaatctacgaatttcataataacatattcctaaaggagctggaaaaatatgaacagttgccagaggatgttggacattgttttgttacttgggcagacaagtttcagatgtatgtcacatattgcaaaaataagcctgattctactcagctgatattggaacatgcagggtcctattttgacgagatacagcagcgacatggattagccaattccatttcttcctaccttattaaaccagttcagcgaataacgaagtatcagctccttttaaaagagctgctgacgtgctgtgaggaaggaaagggagagattaaagatggcctggaggtgatgctcagcgtgccgaagcgagccaatgatgccatgcacctcagcatgctggaagggtttgatgaaaacattgagtctcagggagaactcatcctacaggaatccttccaagtgtgggacccaaaaaccttaattcgaaagggtcgagaacggcatctcttcctttttgaaatgtccttagtatttagtaaagaagtgaaagattccagtgggagaagcaagtacctttataaaagcaaattgtttacctcagagttgggtgtcacagaacatgttgaaggagacccttgcaaatttgcactgtgggtggggagaacaccaacttcagataataaaattgtccttaaggcttccagcatagagaacaagcaggactggataaagcatatccgcgaagtcatccaggagcggacgatccacctgaagggagccctgaaggagcccattcacatccctaagaccgctcccgccacaagacagaagggaaggagggatggagaggatctggacagccaaggagacggcagcagccagcctgatacgatttccatcgcctcacggacgtctcagaacacgctggacagcgataagctctctggtggctgtgagctgacagtggtgatccatgacttcaccgcttgcaacagcaacgagctgaccatccgacggggccagaccgtggaagttctggagcggccgcatgacaagcctgactggtgtctggtgcggacaactgaccgctccccagcggcagaaggcctggtcccctgtggttcactgtgcatcgcccactccagaagtagcatggaaatggagggcatcttcaaccacaaagactcgctctccgtctccagcaatgacgccagtccacccgcatccgtggcttccctccagccccacatgatcggggcccagagctcgccgggccccaagcggccgggcaacaccctgcgcaagtggctcaccagccccgtgcggcggctcagcagcggcaaggccgacgggcacgtgaagaagctggcgcacaagcacaagaagagccgcgaggtccgcaagagcgccgacgccggctcgcagaaggactccgacgacagtgcggccaccccgcaggacgagacggtcgaggagagaggccggaacgagggcctgagcagcggtactctctccaaatcctcctcctcggggatgcagagctgtggagaagaggaaggcgaggagggggccgacgccgtgcccctgccgccacccatggccatccagcagcacagcctcctccagccagactcacaggatgacaaggcctcttctcggttattagtccgccccaccagctccgaaacaccgagtgcagccgagctcgtcagtgcaattgaggaactcgtgaaaagcaagatggcactggaggatcgccccagctcactccttgttgaccagggagatagtagcagcccttccttcaacccttcggataattcccttctctcttcctcctcgcccattgatgagatggaagaaaggaaatccagctctttaaagagaagacactacgttttgcaagaactagtggagacagagcgtgactatgtgcgggaccttggctatgtggttgagggctacatggcacttatgaaagaagatggtgttcctgatgacatgaaaggaaaagacaaaattgtgttcggcaacatccatcagatttacgactggcacagagacttttttttaggagagttagagaagtgccttgaagatccagaaaaactaggatccctttttgttaaacacgagagaaggttgcacatgtacatagcttattgtcaaaataaaccaaagtctgagcacattgtctcagaatacattgataccttttttgaggacttaaagcagcgtcttggccacaggttacagctcacagatctgttgatcaaaccagtgcagagaatcatgaagtatcagctgttactgaaggacttcctcaagtattccaaaaaggccagcctggatacatcagaattagagagagctgtggaagtcatgtgcatagtacccaggcggtgcaacgacatgatgaacgtggggcggctgcaaggattcgacgggaaaatcgttgcccagggtaaactgctcttgcaggacacattcttggtcacagaccaagatgcaggacttctgcctcgctgcagagagaggcgcatcttcctctttgagcagatcgtcatattcagcgaaccacttgataaaaagaagggcttctccatgccgggattcctgtttaagaacagtatcaaggtgagttgcctttgcctggaggaaaatgtggaaaatgatccctgtaaatttgctctgacatcgaggacgggtgacgtggtagagaccttcattttgcattcatctagtccaagtgtccggcaaacttggatccatgaaatcaaccaaattttagaaaaccagcgcaattttttaaatgccttgacatcgccaatcgagtaccagaggaaccacagcgggggcggcggcggcggcggcagcgggggcagcggcgggggtgggggcagcggcggcggcggggcccccagtggcggcagcggccacagtggcggccccagcagctgcggcggcgcccccagcacgagcaggagccggccctcccggatcccccagcctgtccgacaccacccccccgtgctggtctcctctgcagcctcgagccaggcagaggcagacaagatgtcaggtacgtccacccccgggccctccctgcctccccctggcgcggcccccgaggccggccccagcgcgcccagcaggcggccccccggcgcggacgccgaggggtccgagcgagaagcggagccgatccccaagatgaaggtgctggagagccccaggaaaggcgccgcgaacgcctcggggtcgagcccagacgcccccgccaaggacgcgcgcgctagcctgggcaccctgccgcttgggaagccccgggccggggccgcttcgccgctgaactcgccgctctccagcgcggtcccttctctcggcaaggagcccttcccccccagcagccccctgcagaaggggggctccttctggagctccatccccgcctcccccgccagccgacccggctccttcaccttcccgggggacagcgactccctccagcggcagacaccccgccacgcggcccctggcaaggatactgaccgcatgagcacgtgctcctcggccagcgagcagtccgtgcagtccacccagagcaacgggagtgaaagcagcagcagtagcaacatctccaccatgttggtgacacacgattacacggcagtgaaggaggatgagatcaacgtctaccaaggagaggtcgttcaaattctggccagcaaccagcagaacatgtttctggtgttccgagccgccactgaccagtgccccgcagctgagggctggattccaggctttgtcctgggccacaccagtgcagtcatcgtggagaacccggacgggactctcaagaagtcaacatcttggcacacagcactccgtttaaggaaaaaatctgagaaaaaagataaagacggcaaaagggaaggcaagttagagaacggttatcggaagtcacgggaaggactcagcaacaaggtatctgtgaagcttctcaatcccaactacatttatgacgttcccccagaattcgtcattccattgagtgaggtcacgtgtgagacaggggagaccgttgttcttagatgtcgagtctgtggccgccccaaagcctcaattacctggaagggccctgaacacaacaccttgaacaacgatggtcactacagcatctcctacagtgacctgggagaggccacgctgaagattgtgggcgtgaccacggaagatgacggcatctacacgtgcatcgctgtcaatgacatgggttcagcctcatcgtcggccagcctgagggtcctaggtccagggatggatgggatcatggtgacctggaaagacaactttgactccttctacagtgaagtggctgagcttggcaggggcagattctctgtcgttaagaaatgtgatcagaaaggaaccaagcgagcagtggccactaagtttgtgaacaagaagttgatgaagcgcgaccaggtcacccatgagcttggcatcctgcagagcctccagcaccccctgcttgtcggcctcctcgacacctttgagacccccaccagctacatcctggtcttagaaatggctgaccagggtcgcctcctggactgcgtggtgcgatggggaagcctcactgaagggaagatcagggcgcacctgggggaggttctggaagctgtccggtacctgcacaactgcaggatagcacacctggacctaaagcctgagaatatcctggtggatgagagtttagccaagccaaccatcaaactggctgactttggagatgctgttcagctcaacacgacctactacatccaccagttactggggaaccctgaattcgcagcccctgaaatcatcctcgggaaccctgtctccctgacctcggatacgtggagtgttggagtgctcacatacgtacttcttagtggcgtgtcccccttcctggatgacagtgtggaagagacctgcctgaacatttgccgcttagactttagcttcccagatgactactttaaaggagtgagccagaaggccaaggagttcgtgtgcttcctcctgcaggaggaccccgccaagcgtccctcggctgcgctggccctccaggagcagtggctgcaggccggcaacggcagaagcacgggcgtcctcgacacgtccagactgacttccttcattgagcggcgcaaacaccagaatgatgttcgacctatccgtagcattaaaaactttctgcagagcaggcttctgcctagagtttgacctatccagaagttctttctcattctctttcacctgccaatcagctgttaatctgaattttcaagagaaaacaagcaaacataactgatcagctgccggtatgttcatcgtgtgaaattgcattccaagtgagctgtgctcagcagtgcttggacacagagctgcaagctgcgctggggtggaggaccgtcacttacactctgcccaaggcagaggtcgcattgctgtatcacagtattttattcaggtttctgcaaaaaaataaaaagataacttttttaaacaaacatgaatagaattttgcaaatttaacgttttcaagatttattcaaggaaacaaaatgcctatgttcaaccactggtgttaatgaacaaagatactgtgcgtctctggggaagacgcacctaggtggcggccactcccatggccttgtctaggactcagagaccactcggctctgagcttccaggcgcctcgtctgtgtgcatctcacgcccgacgtggcttctgaaacgtgcattcaacctcaaacttttgcataaaatagaatgaatcgttttgctctgatgaaatgtaggccttacttgtatataagactgttcctgccttcggtctgtcattttcccacctgcctcccctacccaccccccacccaccacctggggcttcctctgggggtccgagggtcttcccatcacatgaagacatcaggttgggtcctgccccactgcccctccccctgttcctgccccaagccgtcaatcagattgtggagcagtacacagtcagatgaaaatactgtaaatgcactcattgggggttttttggttttacttcatatcatgtgcaatgttgtggctttaacattttatgcaactatttatgaagacctctgttgtacctgtaataaatatatagaaaaagcaaaaaaaaaaaaaaaaaa

SEQ ID NO: 142 - DNA, 3691 bp, Homo sapiens
tggaggcgcgcaggccggctccgctccggccccggacgatgcggcgcgcccaggatgctgccgtgcctcgtagtgctgctggcggcgctcctcagcctccgtcttggctcagacgctcatgggacagagctgcccagccctccgtctgtgtggtttgaagcagaatttttccaccacatcctccactggacacccatcccaaatcagtctgaaagtacctgctatgaagtggcactcctgaggtatggaatagagtcctggaactccatctccaactgtagccagaccctgtcctatgaccttaccgcagtgaccttggacctgtaccacagcaatggctaccgggccagagtgcgggctgtggacggcagccggcactccaactggaccgtcaccaacacccgcttctctgtggatgaagtgactctgacagttggcagtgtgaacctagagatccacaatggcttcatcctcgggaagattcagctacccaggcccaagatggcccccgcaaatgacacatatgaaagcatcttcagtcacttccgagagtatgagattgccattcgcaaggtgccgggaaacttcacgttcacacacaagaaagtaaaacatgaaaacttcagcctcctaacctctggagaagtgggagagttctgtgtccaggtgaaaccatctgtcgcttcccgaagtaacaaggggatgtggtctaaagaggagtgcatctccctcaccaggcagtatttcaccgtgaccaacgtcatcatcttctttgcctttgtcctgctgctctccggagccctcgcctactgcctggccctccagctgtatgtgcggcgccgaaagaagctacccagtgtcctgctcttcaagaagcccagccccttcatcttcatcagccagcgtccctccccagagacccaagacaccatccacccgcttgatgaggaggcctttttgaaggtgtccccagagctgaagaacttggacctgcacggcagcacagacagtggctttggcagcaccaagccatccctgcagactgaagagccccagttcctcctccctgaccctcacccccaggctgacagaacgctgggaaacggggagccccctgtgctgggggacagctgcagtagtggcagcagcaatagcacagacagcgggatctgcctgcaggagcccagcctgagccccagcacagggcccacctgggagcaacaggtggggagcaacagcaggggccaggatgacagtggcattgacttagttcaaaactctgagggccgggctggggacacacagggtggctcggccttgggccaccacagtcccccggagcctgaggtgcctggggaagaagacccagctgctgtggcattccagggttacctgaggcagaccagatgtgctgaagagaaggcaaccaagacaggctgcctggaggaagaatcgcccttgacagatggccttggccccaaattcgggagatgcctggttgatgaggcaggcttgcatccaccagccctggccaagggctatttgaaacaggatcctctagaaatgactctggcttcctcaggggccccaacgggacagtggaaccagcccactgaggaatggtcactcctggccttgagcagctgcagtgacctgggaatatctgactggagctttgcccatgaccttgcccctctaggctgtgtggcagccccaggtggtctcctgggcagctttaactcagacctggtcaccctgcccctcatctctagcctgcagtcaagtgagtgactcgggctgagaggctgcttttgattttagccatgcctgctcctctgcctggaccaggaggagggcccctggggcagaagttaggcacgaggcagtctgggcacttttctgcaagtccactggggctggccccagccaggccctgcagggctggtcagggtgtctggggcaggaggaggccaactcactgaactagtgcagggtatgtgggtggcactgacctgttctgttgactggggccctgcagactctggcagagctgagaagggcagggaccttctccctcctaggaactctttcctgtatcataaaggattatttgctcaggggaaccatggggctttctggagttgtggtgaggccaccaggctgaagtcagctcagacccagacctccctgcttaggccactcgagcatcagagcttccagcaggaggaagggctgtaggaatggaagcttcagggccttgctgctggggtcatttttaggggaaaaaggaggatatgatggtcacatggggaacctcccctcatcgggcctctggggcaggaagcttgtcactggaagatcttaaggtatatattttctggacactcaaacacatcataatggattcactgaggggagacaaagggagccgagaccctggatggggcttccagctcagaacccatccctctggtgggtacctctggcacccatctgcaaatatctccctctctccaacaaatggagtagcatccccctggggcacttgctgaggccaagccactcacatcctcactttgctgccccaccatcttgctgacaacttccagagaagccatggttttttgtattggtcataactcagccctttgggcggcctctgggcttgggcaccagctcatgccagccccagagggtcagggttggaggcctgtgcttgtgtttgctgctaatgtccagctacagacccagaggataagccactgggcactgggctggggtccctgccttgttggtgttcagctgtgtgattttggactagccacttgtcagagggcctcaatctcccatctgtgaaataaggactccacctttaggggaccctccatgtttgctgggtattagccaagctggtcctgggagaatgcagatactgtccgtggactaccaagctggcttgtttcttatgccagaggctaacagatccaatgggagtccatggtgtcatgccaagacagtatcagacacagccccagaagggggcattatgggccctgcctccccataggccatttggactctgccttcaaacaaaggcagttcagtccacaggcatggaagctgtgaggggacaggcctgtgcgtgccatccagagtcatctcagccctgcctttctctggagcattctgaaaacagatattctggcccagggaatccagccatgacccccacccctctgccaaagtactcttaggtgccagtctggtaactgaactccctctggaggcaggcttgagggaggattcctcagggttcccttgaaagctttatttatttattttgttcatttatttattggagaggcagcattgcacagtgaaagaattctggatatctcaggagccccgaaattctagctctgactttgctgtttccagtggtatgaccttggagaagtcacttatcctcttggagcctcagtttcctcatctgcagaataatgactgacttgtctaattcgtagggatgtgaggttctgctgaggaaatgggtatgaatgtgccttgaacacaaagctctgtcaataagtgatacatgttttttattccaataaattgtcaagaccacaaaaaaaaaaaaaaaaaaaaaaaaaaaaaaaaaaaaaaaaaaaaaaaaaaaaaaaaaaaaaaa

SEQ ID NO: 143 - DNA, 2212 bp, Homo sapiens
ggcttctgggtcaaaggaccagtctgcagagggatcctgtggctggaagcgaggaggctccacacggccgttgcagctaccgcagccaggatctgggcatccaggcacggccatgacccctccgaggctcttctgggtgtggctgctggttgcaggaacccaaggcgtgaacgatggtgacatgcggctggccgatgggggcgccaccaaccagggccgcgtggagatcttctacagaggccagtggggcactgtgtgtgacaacctgtgggacctgactgatgccagcgtcgtctgccgggccctgggcttcgagaacgccacccaggctctgggcagagctgccttcgggcaaggatcaggccccatcatgctggatgaggtccagtgcacgggaaccgaggcctcactggccgactgcaagtccctgggctggctgaagagcaactgcaggcacgagagagacgctggtgtggtctgcaccaatgaaaccaggagcacccacaccctggacctctccagggagctctcggaggcccttggccagatctttgacagccagcggggctgcgacctgtccatcagcgtgaatgtgcagggcgaggacgccctgggcttctgtggccacacggtcatcctgactgccaacctggaggcccaggccctgtggaaggagccgggcagcaatgtcaccatgagtgtggatgctgagtgtgtgcccatggtcagggaccttctcaggtacttctactcccgaaggattgacatcaccctgtcgtcagtcaagtgcttccacaagctggcctctgcctatggggccaggcagctgcagggctactgcgcaagcctctttgccatcctcctcccccaggacccctcgttccagatgcccctggacctgtatgcctatgcagtggccacaggggacgccctgctggagaagctctgcctacagttcctggcctggaacttcgaggccttgacgcaggccgaggcctggcccagtgtccccacagacctgctccaactgctgctgcccaggagcgacctggcggtgcccagcgagctggccctactgaaggccgtggacacctggagctggggggagcgtgcctcccatgaggaggtggagggcttggtggagaagatccgcttccccatgatgctccctgaggagctctttgagctgcagttcaacctgtccctgtactggagccacgaggccctgttccagaagaagactctgcaggccctggaattccacactgtgcccttccagttgctggcccggtacaaaggcctgaacctcaccgaggatacctacaagccccggatttacacctcgcccacctggagtgcctttgtgacagacagttcctggagtgcacggaagtcacaactggtctatcagtccagacgggggcctttggtcaaatattcttctgattacttccaagccccctctgactacagatactacccctaccagtccttccagactccacaacaccccagcttcctcttccaggacaagagggtgtcctggtccctggtctacctccccaccatccagagctgctggaactacggcttctcctgctcctcggacgagctccctgtcctgggcctcaccaagtctggcggctcagatcgcaccattgcctacgaaaacaaagccctgatgctctgcgaagggctcttcgtggcagacgtcaccgatttcgagggctggaaggctgcgattcccagtgccctggacaccaacagctcgaagagcacctcctccttcccctgcccggcagggcacttcaacggcttccgcacggtcatccgccccttctacctgaccaactcctcaggtgtggactagacggcgtggcccaagggtggtgagaaccggagaaccccaggacgccctcactgcaggctcccctcctcggcttccttcctctctgcaatgaccttcaacaaccggccaccagatgtcgccctactcacctgagcgctcagcttcaagaaattactggaaggcttccactagggtccaccaggagttctcccaccacctcaccagtttccaggtggtaagcaccaggacgccctcgaggttgctctgggatccccccacagcccctggtcagtctgcccttgtcactggtctgaggtcattaaaattacattgaggttcctaaaaaaaaaaaaaaaaaaaaaa

SEQ ID NO: 144 - DNA, 6344 bp, Homo sapiens
gcggaagtgtgggagggtctgcggggcgggctcaggaggtccgcgggaggatggagcagtgagcgggtctgggcggctgctggcagcgccatggagacggtacagctgaggaacccgccgcgccggcagctgaaaaagttggatgaagatagtttaaccaaacaaccagaagaagtatttgatgtcttagagaaacttggagaagggtcctatggcagcgtatacaaagctattcataaagagaccggccagattgttgctattaagcaagttcctgtggaatcagacctccaggagataatcaaagaaatctctataatgcagcaatgtgacagccctcatgtagtcaaatattatggcagttattttaagaacacagacttatggatcgttatggagtactgtggggctggttctgtatctgatatcattcgattacgaaataaaacgttaacagaagatgaaatagctacaatattacaatcaactcttaagggacttgaataccttcattttatgagaaaaatacaccgagatatcaaggcaggaaatattttgctaaatacagaaggacatgcaaaacttgcagattttggggtagcaggtcaacttacagataccatggccaagcggaatacagtgataggaacaccattttggatggctccagaagtgattcaggaaattggatacaactgtgtagcagacatctggtccctgggaataactgccatagaaatggctgaaggaaagcccccttatgctgatatccatccaatgagggcaatcttcatgattcctacaaatcctcctcccacattccgaaaaccagagctatggtcagataactttacagattttgtgaaacagtgtcttgtaaagagccctgagcagagggccacagccactcagctcctgcagcacccatttgtcaggagtgccaaaggagtgtcaatactgcgagacttaattaatgaagccatggatgtgaaactgaaacgccaggaatcccagcagcgggaagtggaccaggacgatgaagaaaactcagaagaggatgaaatggattctggcacgatggttcgagcagtgggtgatgagatgggcactgtccgagtagccagcaccatgactgatggagccaatactatgattgagcacgatgacacgttgccatcacaactgggcaccatggtgatcaatgcagaggatgaggaagaggaaggaactatgaaaagaagggatgagaccatgcagcctgcgaaaccatcctttcttgaatattttgaacaaaaagaaaaggaaaaccagatcaacagctttggcaagagtgtacctggtccactgaaaaattcttcagattggaaaataccacaggatggagactacgagtttcttaagagttggacagtggaggaccttcagaagaggctcttggccctggaccccatgatggagcaggagattgaagagatccggcagaagtaccagtccaagcggcagcccatcctggatgccatagaggctaagaagagacggcaacaaaacttctgagcaaggccaggctgtgagggccccagctccacccaggctttgggtgaattctggatggcttgcctcatgtttgttagccagcacttctgctctgtcgtctctccacagcacctttgtgaactcaggaatgtgcgccagtgggaagggctctcttgacagtcagcgtgccatcttgatgtgtgtatgtacattggtcaggtatattatctcaaaggatttatattggcgcttttaactcagagttttaaaccccaggaacagagactcctagttgagtgatagctgggaaagttttacattgtctgtttttcttctcccaatagctttcaattgttctttctggaagacttttaaaaaaatataaatatgcatatatatatataaattataaatagattccccacgcagtgtggtggcatctctgtacaggtacagttttaaacggtttgcctcttttctgtaagattatggtactgtggaacatgagggcagaggacaccgggaggctgttagggggtcactgaatcccaggagccaacctccccctttgcagggctgcatttaaaaattaggtttgggacagttcttgtaccgtggtttcagccttgtgtggtcatcactggcttctggagctattggtgatgtccaagggaaagctttgagagtttatgtttactctttgagtcccaggagaagcctggcaccctctttgcaaattggcctttgctctttcaatgcctttcatccatctccactctctcaactgcctaaagtcacagcacagatactgcccagtgccttaagaggagacatgatctctaccagggactctcagcaaacacgggactgtgttcagtccacaaaggaaaagcgtttttgaagctctcattgttcatgtaaaaatcatacacgtggcatgttgctccacattccttacacacaggggtagaggggattgcttttgtgacccacgttcaaatatgtgactgttttcttttctcttttactgctaagcagcctggaaaggataaatgaatattagactaagatttgttttccaggaggctcaatctgaacacacagaatgtcagagctggaagggactatagagatcatctgatctgatcctcttgtacggatgatcgcaaaactgaggtgtagagaggggaatggccaaaatcacaaagcaagttagcgttaagagctgagactagaattcagggtcctcactcccaggccaccgaaccatgcagccccttctttgggggaagagacctgtgtcagtcttggttaattgttccagggaaccttgctaacagaaacttgctcttgccttggctcttcagtagatgacctggctgtaaagagattccctggacgagccagatcattcagtttcagcgagtccttgagctccacaacatctaccagatatagcagacaagcacccatggaggcaggtttcgggcctgaagcagatcagagggctttgcaaaagacagcatagagccatcttcctgcaactttacctctttccctcagatggggagccatgactgggttgcacctcaggatactgtaatttgactccataattgcttttgctcctgaaacctgggaatcaatggaaaggcagggaatgtgcctcttctgtggccagattctgttatttgcaattaaagcaagtttttaaaaaatgcaagaggcagttgttagtcttcagggcttggcaactgaaatagctatgtggcggatacggaaaacagaggacaatttgaggatcttgctggaataataaatgacagctaccatttgttgagcacctattatatatcaggcactgagctgggtaggctctaaacttcacaataaccctgtgacttaactactttatctccattttgtagttgaagaaataagttcagagagaaagattccttcccaaggtcatgcagctagtaaatgatagaatcaggattcatagcatcactatagggggtcaatatttacacaaaaaaggaaagtcacaagcctgtttaaaatgaagtgaccaccttttcttgcatagactaaataactcgaactggcatttttaggttggaaagacagctgaattagtagttaagtctgatagccaagtaagttttaaaaaccaaagcatccaggatgcacacccctgcaccatttgctgtgcgaattaatagttctgtctctctctctctttcttttttctttttattctttgagatggattttcgctcttgtcgcccaggctggagtacaatggcacgatcttggctcactgcaacctccgcctcccgggttcaagcgattcttctgctgggattacagcatatgccaccatgcccagattatttttttgtatttgtagtagagacggggtttcaccatgtcagtcaggctggtcttgaactcctgacctcaggtgatccacccgcctcagcctcccacactgctgggattacaggcatgagccaccgctcctggcctctctttcttttttaaacaaagaactttgcacttggccagagaggaggagaaagcccattttctcccttcctaagctagatccaaataaaagaaagttcagttttcccccataactattcttgggtcatgaactttgatctggagtttgttttgtttcaggaatgtgtgcacccagcttgctgatccaacaaagtctattgcttaccagtctagcttgatgaagccttttggccagaagtcaatttgttttggatcagagaaatttcctgacaaggtatatttgttttctagtgacagaaaggcaaaggaacaagtcctagttgttgttgttgttgttgaatactaaatttaagatatgtcagcttgctttcaatgagccttgggcttctgttattgcttgagcatttggaactcgagcttccagagaaatttgaggtcctcgcttgttctctgccttcaagaaacaatgacctgattctgtctttaaaaaaaaaaatctcagaattctttttttgtttgtgtttttttttttttttgagacagagtctcactctgttgcccaggctggagtgcagtggcgccatctcggctcactgcaacctccgcctcccaggttcaagcaattctcctgcctcagcctcccaggtagctgccactacaggtgctgcaccaccacgcccggctaatttttgtatttttagtagagacagggtttcaccatattagccaggtgggtcttgaactcctgaccttgtgatccacccgcctcggcctcccaaagtgctgggattacaggcgtgagccaccttgcctggccaaaaatctcagaattctttaagactgttttaattgctccatcagtaattttgaagcactttcctttttttttttttttcccctttttgtccctttccccaagccaccaattggatggatgaatgtttgacggggaagaggaagggtaggaggatgcatggatgagtggatgagtggatcgatggatgtattgataaatagatagaaccagtcatctgaagcaacttaagaattgtagccttgactccttgagactgtagatttcgatccaggaaacatttatttagcacctgccagatgccagaaatttataccatttaaaactcagtaagtcttttaaatatcaggaaggagagaagcgacatcatgatacatcctatgggtattaaaaagccaatagaatattatgaataattttatgctaataaatttaacaacttcaacatcataaacaaattccttgaaaaataaaaagtaccaaaattcattcaagaagaaatagataccagcctgagcaacatggcaaaatcccatctctacaaaacatcaaaaaaaaaaaaaattagtcgggcatggtggtgcacacctgtaatcccagcttgtcaggaggctgaagtgggaggatcacctgagcccagggaggtcaaggatgcagtgagccatggtctcaccactgcactctagcctgggtgacagaatgagaccccgtctcaaaaaaaaagaagaagtagataatctgaatagccctatatctatagaaacttaatagtgctgggagatataggtattattatcctcattttacagatgtgaaaattgaggctcagagaagtaaagtctattgctcaaggtcatgtggctagaatatggcagagccatgattcagatccaggtcttctgattcttattccagtgtcctttctagcataccatgttgcctctaaagattgcagctccttatttactagaaaattgttcctgcccaatctacatctccacctcaccccatcttttcttaagcactatgtttgtgtttttatcagtattatattcattgtctttggaatacatgttcttgtttgtgtttggaaaaaaaatctcttttaccagcttgcactcggaccaacttggaaaaaaaaaagcttaaatgtttttgctatgtacagtttaaaaatgtgaagtttgtagctttaactttttgtaagaaaatctaataacactggcttaagtgctgacttgaaatgctattttgtaaggtttggatgtaagtaatcaattgaggtcagcagtttgtatgagacatagcttcctccattgcccccactccttttttcttttttaagtttgagatgcttcctgtgtttttatgttagaattgttgttctccttcttttcttcttcctatacctcatcacgtttgttttaaataaactgtcctttggaccacaaaaaaaaaaaaaaaa

SEQ ID NO: 145 - DNA, 4922 bp, Homo sapiens
cgtcgccgcagcagccaccaattcgccagcggttcaggtggctcttgcctcgatgtcctagcctaggggcccccgggccggacttggctgggctcccttcaccctctgcggagtcatgagggcgaacgacgctctgcaggtgctgggcttgcttttcagcctggcccggggctccgaggtgggcaactctcaggcagtgtgtcctgggactctgaatggcctgagtgtgaccggcgatgctgagaaccaataccagacactgtacaagctctacgagaggtgtgaggtggtgatggggaaccttgagattgtgctcacgggacacaatgccgacctctccttcctgcagtggattcgagaagtgacaggctatgtcctcgtggccatgaatgaattctctactctaccattgcccaacctccgcgtggtgcgagggacccaggtctacgatgggaagtttgccatcttcgtcatgttgaactataacaccaactccagccacgctctgcgccagctccgcttgactcagctcaccgagattctgtcagggggtgtttatattgagaagaacgataagctttgtcacatggacacaattgactggagggacatcgtgagggaccgagatgctgagatagtggtgaaggacaatggcagaagctgtcccccctgtcatgaggtttgcaaggggcgatgctggggtcctggatcagaagactgccagacattgaccaagaccatctgtgctcctcagtgtaatggtcactgctttgggcccaaccccaaccagtgctgccatgatgagtgtgccgggggctgctcaggccctcaggacacagactgctttgcctgccggcacttcaatgacagtggagcctgtgtacctcgctgtccacagcctcttgtctacaacaagctaactttccagctggaacccaatccccacaccaagtatcagtatggaggagtttgtgtagccagctgtccccataactttgtggtggatcaaacatcctgtgtcagggcctgtcctcctgacaagatggaagtagataaaaatgggctcaagatgtgtgagccttgtgggggactatgtcccaaagcctgtgagggaacaggctctgggagccgcttccagactgtggactcgagcaacattgatggatttgtgaactgcaccaagatcctgggcaacctggactttctgatcaccggcctcaatggagacccctggcacaagatccctgccctggacccagagaagctcaatgtcttccggacagtacgggagatcacaggttacctgaacatccagtcctggccgccccacatgcacaacttcagtgttttttccaatttgacaaccattggaggcagaagcctctacaaccggggcttctcattgttgatcatgaagaacttgaatgtcacatctctgggcttccgatccctgaaggaaattagtgctgggcgtatctatataagtgccaataggcagctctgctaccaccactctttgaactggaccaaggtgcttcgggggcctacggaagagcgactagacatcaagcataatcggccgcgcagagactgcgtggcagagggcaaagtgtgtgacccactgtgctcctctgggggatgctggggcccaggccctggtcagtgcttgtcctgtcgaaattatagccgaggaggtgtctgtgtgacccactgcaactttctgaatggggagcctcgagaatttgcccatgaggccgaatgcttctcctgccacccggaatgccaacccatggagggcactgccacatgcaatggctcgggctctgatacttgtgctcaatgtgcccattttcgagatgggccccactgtgtgagcagctgcccccatggagtcctaggtgccaagggcccaatctacaagtacccagatgttcagaatgaatgtcggccctgccatgagaactgcacccaggggtgtaaaggaccagagcttcaagactgtttaggacaaacactggtgctgatcggcaaaacccatctgacaatggctttgacagtgatagcaggattggtagtgattttcatgatgctgggcggcacttttctctactggcgtgggcgccggattcagaataaaagggctatgaggcgatacttggaacggggtgagagcatagagcctctggaccccagtgagaaggctaacaaagtcttggccagaatcttcaaagagacagagctaaggaagcttaaagtgcttggctcgggtgtctttggaactgtgcacaaaggagtgtggatccctgagggtgaatcaatcaagattccagtctgcattaaagtcattgaggacaagagtggacggcagagttttcaagctgtgacagatcatatgctggccattggcagcctggaccatgcccacattgtaaggctgctgggactatgcccagggtcatctctgcagcttgtcactcaatatttgcctctgggttctctgctggatcatgtgagacaacaccggggggcactggggccacagctgctgctcaactggggagtacaaattgccaagggaatgtactaccttgaggaacatggtatggtgcatagaaacctggctgcccgaaacgtgctactcaagtcacccagtcaggttcaggtggcagattttggtgtggctgacctgctgcctcctgatgataagcagctgctatacagtgaggccaagactccaattaagtggatggcccttgagagtatccactttgggaaatacacacaccagagtgatgtctggagctatggtgtgacagtttgggagttgatgaccttcggggcagagccctatgcagggctacgattggctgaagtaccagacctgctagagaagggggagcggttggcacagccccagatctgcacaattgatgtctacatggtgatggtcaagtgttggatgattgatgagaacattcgcccaacctttaaagaactagccaatgagttcaccaggatggcccgagacccaccacggtatctggtcataaagagagagagtgggcctggaatagcccctgggccagagccccatggtctgacaaacaagaagctagaggaagtagagctggagccagaactagacctagacctagacttggaagcagaggaggacaacctggcaaccaccacactgggctccgccctcagcctaccagttggaacacttaatcggccacgtgggagccagagccttttaagtccatcatctggatacatgcccatgaaccagggtaatcttggggagtcttgccaggagtctgcagtttctgggagcagtgaacggtgcccccgtccagtctctctacacccaatgccacggggatgcctggcatcagagtcatcagaggggcatgtaacaggctctgaggctgagctccaggagaaagtgtcaatgtgtaggagccggagcaggagccggagcccacggccacgcggagatagcgcctaccattcccagcgccacagtctgctgactcctgttaccccactctccccacccgggttagaggaagaggatgtcaacggttatgtcatgccagatacacacctcaaaggtactccctcctcccgggaaggcaccctttcttcagtgggtctcagttctgtcctgggtactgaagaagaagatgaagatgaggagtatgaatacatgaaccggaggagaaggcacagtccacctcatccccctaggccaagttcccttgaggagctgggttatgagtacatggatgtggggtcagacctcagtgcctctctgggcagcacacagagttgcccactccaccctgtacccatcatgcccactgcaggcacaactccagatgaagactatgaatatatgaatcggcaacgagatggaggtggtcctgggggtgattatgcagccatgggggcctgcccagcatctgagcaagggtatgaagagatgagagcttttcaggggcctggacatcaggccccccatgtccattatgcccgcctaaaaactctacgtagcttagaggctacagactctgcctttgataaccctgattactggcatagcaggcttttccccaaggctaatgcccagagaacgtaactcctgctccctgtggcactcagggagcatttaatggcagctagtgcctttagagggtaccgtcttctccctattccctctctctcccaggtcccagccccttttccccagtcccagacaattccattcaatctttggaggcttttaaacattttgacacaaaattcttatggtatgtagccagctgtgcactttcttctctttcccaaccccaggaaaggttttccttattttgtgtgctttcccagtcccattcctcagcttcttcacaggcactcctggagatatgaaggattactctccatatcccttcctctcaggctcttgactacttggaactaggctcttatgtgtgcctttgtttcccatcagactgtcaagaagaggaaagggaggaaacctagcagaggaaagtgtaattttggtttatgactcttaaccccctagaaagacagaagcttaaaatctgtgaagaaagaggttaggagtagatattgattactatcataattcagcacttaactatgagccaggcatcatactaaacttcacctacattatctcacttagtcctttatcatccttaaaacaattctgtgacatacatattatctcattttacacaaagggaagtcgggcatggtggctcatgcctgtaatctcagcactttgggaggctgaggcagaaggattacctgaggcaaggagtttgagaccagcttagccaacatagtaagacccccatctctttaaaaaaaaaaaaaaaaaaaaaaaaaaa

SEQ ID NO: 146 - DNA, 2906 bp, Homo sapiens
aagaagcgacgtgtcccactgtcctggctccgtgggtccagtgagattgggcctgggcgctggagctgctgtggctcccgccgcggcggctgccatggaggccatgccagagcccagaactcacgccgggggaggccgagacagccggcggtactcatagatgaggcagcggcggcggcggcggcggcggcagcccgggctctccatgagcaggcggcggcggcgacgggtgcggcggcaccggcagttttcggtccccagggaggatgaagacactgtttgaagagatcaaagcatcaattaaaaataactataaccaagatcgatcattttgtaggcctgttcttccttgggggggtgtttttactatcaaagctggccgcaaagcagtatcctgtacaccactctatgttgaaataagactgaaaaatacctgcaccatagatggattcttgatgttattatatgtcattcttaatgaaaatgaaaacttccctagggaactctctcttcattttggtagagagtttgtagactgttttctttacttaatggacacctacagttttacaactgtgaagctactttggatttgggacaagatggaaaaacagcaatacaaatctgaagtccataaagcttcattaataattgatttgtttgggaatgagcatgataattttacaaaaaatcttgaaaatctcatgtctaccattcaagagagttactgttccaactggcgatgcccaactcgagtgcaggaggatcagcagcgcacaattaatataaatcctccccaagaaattccacatggaaacttgataagactggctgtgaatgagttattctgttccaagattgaactgtgtgaagagcatgggtgtggtggcttaagagaattttcccaacgaattttctgccatggggcacccccttttgttgtcttaaatatgcaacattggaaatctgaagatctggcgtatgtaccctattacttggatttgtctgatcacaagtatttgttggaaggtgccacattatttaacaaagaggaacatcattattctgcagctttccagattggtggacattggatgcactatgatgggctcagaaatgtgaatttaattttgttaaataaacccccagagtttctcctcttgtcatcattggtttatattcgagcaacagagaaataaatatagattgatgctaaaagttgttttccctcctgcccatgctctcccagatgaagggcttttattttgtgtatacttggtatccaagaaaatagttcaactatactagtttcagaagtgtattttcagtgtttaaccccaggtaaatgttttatatagaggatctgtgcaaaaatgtttgtaatttttttatatttcctgagttatttttatatgagcatattttatgttggaataaaatatatcttgtggcctttgtattttttatttatatgtacctcaaagatttttacaattctgtctttgaattcaagaaatactttgtcatctgaattctaaatttttctttttggatattcgagtaaaacctaggtaaaagtattttaagtttatataatttaacagttcaaaatatatctgactgtatttctttgccctacctcactataatccaaagtgcactatttgatctagtatggatttgaatgtacaatttatcgatggcttagtttattagttcgatttgcctagtatccctgcagcaattttttaaaatgtctgagaaatttttcagagcttaaactatttctttataatggcaaattacttttaactacttcctaaagtattataaacctgccagtggattttaagtgatagctaagcttccaagcttaattcacgttattacaaataaattatataactatcttaaatgtttatcttataattaaatgtaatttgaaatgctctaatgtattttgcagataaaacaactataaacaatattaggcaactggatgtttactagtgtcggactagcaatagaaatgcactttaaatatatatttaaggggaaatgcgtgcctggaaatacttcttttcctagtgaagttttatattgacacagagaaaagaatacttaaaattttgagtgatgtctactggcttccttgtaagtagtgattgatagcatgcggctttgacttgcaatacaaatcattacgattttatagttatcagaacattacgtttctttataaagaccctaaggtcactcttctttttgcaacttaagggaaaaaatattctcaagggaaaatactttttgaaatttatcaccattttagtgtttacatttcaataaatagttcacttcaggtttgggattgagattagttgcaatatatttagaagctcctacatgacagcacagatcactgccatctgctgaactgctaaagtgcttggtgccatgttgagaaaacttacccaagaatggataaatatgggtgaaacattactgagaatgcctcacgttagcaaatactatgaaaattcttgtttatatatcaaactgatttattttacaaaaaaaaaaaattcaccccaagatttatttagtttcccaagtgtatctgattaggatttaatttagagtaaacttttctggggacacctgattgcatgaactgaagtatacaataacacaaatattacagtaaacataaatggtgtcattaacaaaattattcctaatgcagatttattctttcaggaaatgcactttatttggaatactagtttatcatgaaacaatgacttacctacctcacagggttgttgtgaggattaagatgtttgttaaaatcttgactaccttgaacatgctaataaaaaaacatttttctacctcttttatttgca

SEQ ID NO: 147 - DNA, 6741 bp, Homo sapiens
gccctgcgcccggggcgcctcggagaactgacctgaagtttcagtgtagtcagagagctcttcaagtaataaatcatggagaccagtcaggaaacttccctcttcttggtgaagatcttggaggaactggacagcaagcaaaataccgtttcttatcaggacctgtgcaaatctctctgtgcccggttcgacctgtcgcagcttgccaaactgagaagtgtgctcttctacacagcttgtctcgatcccaattttccagccacgctattcaaagacaagatgaaatgcactgtgaataaccagcaatcaaagaaaatcatggtggcagcagatattgtgacgatattcaacctgatccaaatgaatggcggggctgccaaggagaagctgcccacgggccgccagaaggtacgcaagaaggaggcatcctttgaatcatgtaggtcggacacagagatctgcaatgcagctgagtgtgagcccctgaactgtgagctgagtgagaggtctttcagccggggctaccccatcaggcagtcgtccaagtgccggaagatggactgcaaggactgcccacagtttgtccctgcctctgagcctaacttcctgttgggagttagcaaagaggtgaaaaaccgcgccgcttccctggacaggttgcaggccctggctccgtactctgtgaccagccctcagccctgtgagatgcagaggacctacttccccatgaacatcgaaaacgagtccatttcagaccaggactccctgcccatcaatcagagcatcaaggagaccttcatttccaatgaggagccatttgtggtccagtcctgtgtccagaaaaggaatatcttcaaagaggattttcacaatttgatggcagtgtcccccagtttggttggccccatcagcaaagcagagaatgagcacagggaaccccagagtcgaaaggaaccccacaagccacccttcttcaaccacagctttgaaatgccctataacagccagtacctgaatccagtgtattccccggttcctgacaaaaggcgagcaaagcacgaaagcttagatgaccttcaagcctctacatattttgggcccactcccgtgatgggaacccaagaagccaggcgctgtctagggaagcccaacaagcagactccctggccagccaaaagctggagcctaaacacagaggaagttcctgactttgaacggtcctttttcaatagaaatccctccgaggagaagctacactatccaaatgccagtagccagacccccaatttcccagccccagaaaggcgcccaacttaccttgtgccaaaggatcaacagccaattctccccattgcttatgcggcaaaacaaaatgggctcaaatctaaagagatctcatcccctgttgacctggagaagcatgaaccagtcaaaaagtttaaagacaagagcattaactgcaccagtgggcagctcagctcagacaccagtagcgtgggcacccagactgagcacgtgctggagcccaagaaatgcagagacctgtgcacctctggtcagggcaagtacagtgacaggcacaccatgaagcactcagacgatgactcagaaattgtcagcgacgacatcagtgacattttccgatttcttgatgacatgagcatcagtggctccacgggagtgatacagtcgtcctgctacaacagcacaggatccttgtctcagctccataagtcagactgcgacagttcccctgagcacaacttaaccaaaattgccaatggggtccccaacagcaagggagacaagggcaaccggcctgaaaacacccaccactcggaagaagagctgaagaccagtgtgtgcaaactggtgctcaggattggcgaaatcgaacggaagctggaatccctgtcgggtgtccgtgatgaaatctcccaggtcttgggcaaactaaataaattggaccagaaaatgcaacagcctgagaaggtgagtgtgcagatagatctgaactccttgacaagcgagggtccgtctgatgacagtgcctctccccggatgttccacgcacacagtggctcccacggacccaaactagagaacaaccctgactggtgctgctctgatgctagcgggagcaacagtgaaagcctgcgggtcaaggccttaaaaaaaagcctcttcaccaggccatcctctaggtccctaacagaggagaacagtgccacagagtccaaaattgccagcatctccaactcgcccagagactggcgcaccatcacttataccaaccgtgtgggcctcaatgaggaggagataaaagacacaggcccaggagataataaagactggcatcggaaatctaaagaggcagacaggcagtacgacattcccccacagcaccgactgcccaagcagcccaaagatggcttcctggtggagcaggtgttcagccctcacccctaccctgcctccctcaaggcccacatgaagagcaaccccctgtacacagacatgcggctgaccgagttggccgaggtgaagcggggccaaccttcttggaccattgaggagtatgcacggaatgcgggcgacaagggcaagctgacagccctggacctgcagacgcaagaatctttaaacccaaataatttagagtactggatggaagacatttatactccaggatacgattcattactaaaacgtaaagaagccgaattcagacgagccaaggtctgcaagatagctgctctgatcgctgctgcggcatgcaccgtcatcctcgttattgtcgtgcccatctgcacaatgaaatcatgagctaagaatgcaaccttacgtacagcttatgactaccaatgtcgtcgtctgtatcttagaatcttgcagcagtgaggcaacaatttgttgaaatggagatgaaatcatggaggcatttctacaaatgttgaatgaaggtggttttcagaaagtatacattctagtgagaaatctacctacctattagctttgactcaattacactctgacgcatttttagaagtgcaatatcttttcctaccaaaagaacatcatggactatcaataaatacaaattgaatattccaagccaaaaaaggaagattaattgggttctttccattttgatgatgtttcatggtggggaataagttatacagaagatatttaatacacgcctctttagaagaaactaagggaaatagcaacataagaagaaaagaggtggcttctcttttccataatgttcttagaccattgctggtgaagtaacagggtgtgtgtccctaaagggtattacttctctgtcgacttttatcaagggctactgacgtttcattcttgcccttttgtcatcaacacgacagagtgtctgcatcactgcagatcttcatggaaacattctggaccttcttccttgcacttggagtgagaaggagctggactaccaagtcaggcgtggaatgaagtatgctcagactgcatgatgggccaaggtattcaggccaggagacctcgtcctcaatccaaagtgtaggggagctgcctgctaacgatgtaaggtcagtatttgaaaatcatggccactccaaaggatctcctgttcttgctttggtgtgtggctccattccttgattttctatctcctggtggtaccagatgctctgcctctcatacatgagttgaagagtttggaacttgtccttgtgccttgaagagtagagacaatggctaaacgttgacattctatctgtaaaccatggttttcacgcaccactaatatctgccattttcaatggctttaaaaagattttgaaagcttgctcaataatgttcaataatataataataataaaggcactgaggtcttctcagttaccccaacacctactccagagttttgaatacttgtcagcagtgcaaaaaatattatctgtttaaccacttatctatatgtctatctatctatctatatgtctatctatctatctaaatacttgatttttatttattgtcttctctgttaaataacttgagagcaaggtttctttcgtgtaaaagaagctgttgtaatttcatccaaatttgatctgtttccacctgctgaatggtgctctgacaataatggaacagaaagaatccttatcagcatctgattccaatgtcttgttacaggtcaaagaaaaaaggattgacagaaactagctaccttatatatattttttgataataaggtgggatataaatagattttggtagcaagtgtaatcactccgtatgatataataaatttctaaaagatttgagagcatctcaatttttaaagcaataggagtctagcatccattctgaaaaatcgcaaataatgcttagcttgctgtgtctgattctgttgttcaccattaaggggtagacagttaattttattatgttaacaagtgagggatgaatgttttcatctgtggtgaacctttatttttagaagtcttcatgttatctatttgtattatcatgtttatgtatggattttcaatttcagtaaccgaaaacttaagccttagtatgaaaaactgaggatttataattgaaaatgaaaaaaatatgttactctctatcatcagaattatagtctttggtgctctgttttcaatggggcatattacataaggttgtttctttcaccccaaagagactactaggttaccactctgggcattgcctttccacctaacccctcaaccagtaagactctacaccatattgtagccccactattctcctctttatcacagatgaagtgccagagcatcagagataggtagctcccaacctcttgctctggatttgcagaagagggggagatgtacttacccaggataagaaaaatctagtcaaatccaccccaaatcttccatttaacaggtaggaccatcgaggctggaccaaaccactttttccactgcccttggtgaatctattcctagtggaccccatttgggcatgtgcctagctaccttgggaaggcatgactataagtcacacctcaggcttggaaatgaaaggattctatagaatattctatactttccatagctggagaggtagtcagaaattcagtcttgctctgagtccacagtagctttaaaattcaactcaacattgttgtcacgtaacggaaacatctagacctggtaataatccaggaaattgcaaaatggaggccaaaagtaaggtgggtttctctggaaaggggtcatcctcagtctgataataccaagtctgacgctgaggttatgaatcattaccatggcttggagctattggatgcttggggtcttgggatagatagaaggtgaggttcacagttggagcttttcttgccattgaccccaagctcaccccagccttccttccctgaccctgagactcaccctatctatctcccctattccctcagtttgcagaatgagcaagatagagtctggctaggagggaaacatctatccatctctctaatctttgcccatcacctcctgttgcaatgagttcccgcaggtgacatacggactggcctctctactgtactgggtgccatctcccaccatactctggcatttttatgtaaaggataatttcttgtacctgagtctaaaattacaacgttatcaaaattcacttcgtttttcctgcattttaaaagtaataaaatattatttgagattattttgaaattaaatatccttaaccaatgattaaattcataatcatttcatcttctttcataatcatttcatcttctaatctgaatttgttttgaacacagccttgcagaaaagcaaaaaatatttccccgctcaaattttgccgacattttataccagtatccccttcattacagtaaactaaatcataacttacatcatccattactagctgatcataaattgttagtattttaaggtatgcaactatgtgattgacatctgtaaggctagtttaatagacgtgctaaatatcactgttctgaatatctgtgccatagttctgatacccttattggaatcaaggcagtgctgtttctgtttacaagttatcaagataagagcagtggcatcacatttgttgttgttgtttttttttttgaaatagaaaaaaacagaagaagctctgccaacaataaaagattttgttaagtggtataaaaattgtgaatgttgaaattcaacatgcttcatattataaccaacctgcaagaatattgtggtcaattgtgtgaataccaaatcagtatatactgtatactgtactatgaaaatttgtatttaaaggcaaagatacaagtaattgttggtataattggggaaaagggtattcaatatttattaagtaacaatgagaaatgcaacaaacttccttatttatgccttatgaataaaagagtgtggaatgtaaggtgaaattttatgtgcaagatcctgaaggaatgggtattcttgaaggcagggactgtcttttctatgtttgttctgtacagctctcagcacactcttggtgcttgataaatgttatgttatataataccaataactaagcacatttttagatcttttttcaaatggcttgtgtaaaatttggttaatgtacaatggttggtttgaagctatcatgtaaaattggcctctccaaatataatcagaaataaaccgaaaaaaatat

SEQ ID NO: 148 - DNA, 1392 bp, Homo sapiens
tgcagactgatatggattcaccactgctaacacctcctggttggaactacaggaatagaactggaaagggaaaaaaggcagcattcaccacatcccaatcctgaatccaagagtctaagatagtcccccactcctatctcaggcttagaggattagattaatctcctggagggaagactcttccttgaaacatttttttttatctgcctgtagctattgggataattcgggaaatccacagggacagttcaagtcatctttgtcctctactttctgttgcactctcagccttgttctctttttagaaactgcatggtaactattatatagctaaagaagagcattctgacctctgccctgggacttcctggatcctcctcttcttataaatacaagggcagagctggtatcccggggagccaggaagcagtgagcccaggagtcctcggccagccctgcctgcccaccaggaggatgaaggtctccgtggctgccctctcctgcctcatgcttgttgctgtccttggatcccaggcccagttcataaatgatgcagagacagagttaatgatgtcaaagcttccactggaaaatccagtagttctgaacagctttcactttgctgctgactgctgcacctcctacatctcacaaagcatcccgtgttcactcatgaaaagttattttgaaacgagcagcgagtgctccaagccaggtgtcatattcctcaccaagaaggggcggcaagtctgtgccaaacccagtggtccgggagttcaggattgcatgaaaaagctgaagccctactcaatataataataaagagacaaaagaggccagccacccacctccaacacctcctgagcctctgaagctcccaccaggccagctctcctcccacaacagcttcccacagcatgaagatctccgtggctgccattcccttcttcctcctcatcaccatcgccctagggaccaagactgaatcctcctcacaaactggggggaaaccgaaggttgttaaaatacagctaaagttggtggggggaccttaccacccctcagagtgctgcttcacctacactacctacaagatcccgcgtcagcggattatggattactatgagaccaacagccagtgctccaagcccggaattgtcttcatcaccaaaaggggccattccgtctgtaccaaccccagtgacaagtgggtccaggactatatcaaggacatgaaggagaactgagtgacccagaaggggtggcgaaggcacagctcagagacataaagagaagatgccaaggccccctcctccacccaccgctaactctcagccccagtcaccctcttggagcttccctgctttgaattaaagaccactcatgctcttc

SEQ ID NO: 149 - DNA, 878 bp, Homo sapiens
tctgcctccactgctctgtgctgggatcatggaacttgcactgctgtgtgggctggtggtgatggctggtgtgattccaatccagggcgggatcctgaacctgaacaagatggtcaagcaagtgactgggaaaatgcccatcctctcctactggccctacggctgtcactgcggactaggtggcagaggccaacccaaagatgccacggactggtgctgccagacccatgactgctgctatgaccacctgaagacccaggggtgcggcatctacaaggactattacagatacaacttttcccaggggaacatccactgctctgacaagggaagctggtgtgagcagcagctgtgtgcctgtgacaaggaggtggccttctgcctgaagcgcaacctggacacctaccagaagcgactgcgtttctactggcggccccactgccgggggcagacccctgggtgctagaagcccacaccctctaccctgttcctcagcatggagctctggcatccccacctcagtatctaacctgaaccagcctggcttttcaaacactccggggggaggtagtcccagcctcccccggaaccctctaccaatgccttctgaccttctgaagctttccgaatcctcccagttgaggcagtagctgtgtcctctgagggtggatgggaatcttgggagaagcccaagcaagggagccatcagaggtggtgtttggaccaaagcatcggggtgggggaggggtctgccgctgtcccccgcctgctggcccccttgtccttcctcaccccctccaatatagtctcggagctgcaaccgcagcagccactataaagggcaatattaaaaaaaaaaaaaaaaaaaaaaaaaaaaa

SEQ ID NO: 150 - DNA, 1943 bp, Homo sapiens
gcctgactgtgttcttatttgctgggtctctctctggaaatctccactttgagtgtttccaacaactgtgattccatttttgtgaatgggaaggaaatgaagagcaaagtggacacgattgtgaacttcacccaccagcacttcacctcccagttcgaggtcactgtctgggcacccaggctccccctgcagattgagatctcagacaccgagctgagccagatcaagggctggaggatcccggttgctgccaacagaaggcctacccgggaaagcgatgacgaggacgatgaggagaagaagggacgaggctgctccctgcagtaccagcacgccacagtgcgtgtcctcacccagtttgtggccgagtcacctgacttagggcagctgacctacatgctgggccccgactggcagtttgacatcactgaccttgtgaccgagttcatgaaggtggaggagccgaaaatcgctcagttacaggacggcaggaccctggctggtcgggagccgggaataaccacggtgcaggtcctctcgccgttgtctgactccatcctggctgagaagacggtgattgtcctggatgaccgagtcaccatcgcggagctgggagtgcagctcgtagctggcatgtctctctccctgcagccacaccgagcagacaaaagggccatcgtctccacagctgctgccctggatgttcttcagtccccacagcaggaagcaatagtaagttcttggattttgttcagtgatggttcggtgacacctttagacatttacgatcctaaggattattctgttactgtctcatcattggatgaaatggtggtgtctgtccaggcaaaccttgagtccaaatggccaattgtggttgcagagggtgaaggacaagggcctttgattaagttagaaatgatgataagtgaaccttgtcagaagaccaagaggaagagtgttcttgccgtgggtaaaggaaatgtcaaggtcaaattcgaaccaagtagtgatgagcaccaaggaggcagcaatgatattgagggcataaatcgggaatataaagaccacctcagtaattccatagagcgcgaaggaaaccaggagagagcagtccaggaatggttccaccgtggcacacctgttggccaagaggaaagtaccaacaaaagcacaaccccccagtctcccatggaagggaagaataagttactcaaaagtggtggtccagatgcctttacaagcttccccactcaagggaagtcaccggaccccaataatcctagtgacctcacagtgacctcaagggggctaacggacttggagattggcatgtatgccttgctctgcgtcttctgtctggccattctggtcttcttgatcaactgcgtggcgtttgcctggaaatacagacacaaaaggtttgctgtgagtgagcagggcaacatcccccattcccacgactgggtctggcttgggaatgaagtggaacttttggagaaccctgttgacattacactcccatcagaggagtgcacaaccatgatagacaggggcctgcagttcgaggagaggaacttccttctgaatggcagttcccagaagacttttcatagtcaactactcagaccctctgactatgtctatgagaaagaaattaaaaatgaacctatgaattcttcgggcccaaagaggaagagagtcaagttcacttcctacaccaccatcctcccagaggacggcggcccatacaccaactccatcctgtttgacagcgatgataacatcaagtgggtctgccaagatatggggctgggggattcacaggactttagagactatatggaaagtctgcaagaccagatgtaaactcctttcttatgtttgtattcacctttatgccttctgttttttgaatgctggagcagtgagtttgatcagca

SEQ ID NO: 151 - DNA, 1403 bp, Homo sapiens
gaaaactactgtttcagtgttcaagcagtgattccctcccgaacagttaaccggaagagtacagacagcccggtagagtgtatgggccaggagaaaggggaattcagagaaatattctacatcattggagctgtggtatttgtggtcatcatccttgtcatcatcctggctatatctctacacaagtgtagaaaggcaggagtggggcagagctggaaggagaactccccactgaatgtttcataaaggaagcactgttggagctactgcaaatgctatattgcactgtgaccgagaacttttaagaggatagaatacatggaaacgcaaatgagtatttcggagcatgaagaccctggagttcaaaaaactcttgatatgacctgttattaccattagcattctggttttgacatcagcattagtcactttgaaatgtaacgaatggtactacaaccaattccaagttttaatttttaacaccatggcaccttttgcacataacatgctttagattatatattccgcactcaaggagtaaccaggtcgtccaagcaaaaacaaatgggaaaatgtcttaaaaaatcctgggtggacttttgaaaagcttttttttttttttttttttttgagacggagtcttgctctgttgcccaggctggagtgcagtagcacgatctcggctcactgcaccctccgtctctcgggttcaagcaattgtctgcctcagcctcccgagtagctgggattacaggtgcgcactaccacgccaagctaatttttgtattttttagtagagatggggtttcaccatcttggccaggctggtcttgaattcctgacctcaggtgatccacccaccttggcctcccaaagtgctagtattatgggcgtgaaccaccatgcccagccgaaaagcttttgaggggctgacttcaatccatgtaggaaagtaaaatggaaggaaattgggtgcatttctaggacttttctaacatatgtctataatatagtgtttaggttcttttttttttcaggaatacatttggaaattcaaaacaattggcaaactttgtattaatgtgttaagtgcaggagacattggtattctgggcaccttcctaatatgctttacaatctgcactttaactgacttaagtggcattaaacatttgagagctaactatatttttataagactactatacaaactacagagtttatgatttaaggtacttaaagcttctatggttgacattgtatatataattttttaaaaaggttttctatatggggattttctatttatgtaggtaatattgttctatttgtatatattgagataatttatttaatatactttaaataaaggtgactgggaattgtaaaaaaaaaaaaaaaaa

SEQ ID NO: 152 - DNA, 2758 bp, Homo sapiens
ggaagaggaggctttctaaggcggtcgctccgggaaatccgggccctaggattgtccactcatcccagtatcagcgagatacggggagatagagttagcgacaacgtgagccagagctggagcacgtttggtgagagaccagaaagcaatggaggccggagaggggaaggagcgcgttccgaaacaaaggcaagtcctgatattctttgttttgctgggcatagctcaggctagttgccagcctaggcactattcagtggccgaggaaacggagagtggctcctttgtggccaatttgttaaaagacctggggctggagataggagaacttgctgtgaggggggccagggtcgtttccaaaggaaaaaaaatgcatttgcagttcgataggcagaccggggatttgttgttaaatgagaaattggaccgggaggagctgtgcggccccacagagccctgtgtcctacctttccaggtgttactagaaaatcccttgcagttttttcaggcggagctacggattagggacgtaaatgatcattccccagttttcctagacaaagaaatacttttgaaaattccagaaagtatcactcctggaactactttcttaatagaacgtgcccaggacttggatgtaggaaccaacagtctccaaaattacacaatcagtcccaatttccactttcatcttaatttacaagacagtctcgatggcataatattaccacagctggtgctgaacagagccctggatcgcgaggagcagcctgagatcaggttaaccctcacagcgctagatggcgggagtccacccaggtccggcacggccctggtacggattgaagttgtggacatcaatgacaacgtcccagagtttgcaaagctgctctatgaggtgcagatcccggaggacagccccgttggatcccaggttgccatcgtctctgccagggatttagacattggaactaatggagaaatatcttatgcattttcccaagcatctgaagacattcgcaaaacgtttcgattaagtgcaaaatcgggagaactgcttttaagacagaaactggatttcgaatccatccagacatacacagtaaatattcaggcgacagatggtgggggcctatctggaacttgtgtggtatttgtccaagtgatggatttgaatgacaatcctccggaactaactatgtcgacacttatcaatcagatcccagaaaacttgcaggacaccctcattgctgtattcagcgtttcagatcctgactccggagacaacggaaggatggtgtgctccatccaagatgatcttccttttttcttgaaaccttctgttgagaacttttacactctggtgataagcacggccctggaccgggagaccagatccgaatacaacatcaccatcaccgtcaccgacttcgggacacccaggctgaaaaccgagcacaacataaccgtgctggtctccgacgtcaatgacaacgcccccgccttcacccaaacctcctacaccctgttcgtccgcgagaacaacagccccgccctgcacatcggcagcgtcagcgccacagacagagactcgggcaccaacgcccaggtcacctactcgctgctgccgccccaggacccgcacctgcccctcgcctccctggtctccatcaacgcggacaacggccacctgttcgctctccagtcgctggactacgaggccctgcaggcgttcgagttccgcgtgggcgccgcagaccgcggctccccggcgttgagcagcgaggcgctggtgcgcgtgctggtgctggacgccaacgacaactcgcccttcgtgctgtacccgctgcagaacggctccgcgccctgcaccgagctggtgccccgggcggccgagccgggctacctggtgaccaaggtggtggcggtggacggcgactcgggccagaacgcctggctgtcgtaccagctgctcaaggccacggagcccgggctgttcggcgtgtgggcgcacaatggcgaggtgcgcaccgccaggctgctgagggagcgcgacgctgccaagcagaggctggtggtgctggtcaaggacaatggcgagcctccgcgctcggccaccgccacgctgcacgtgctcctggtggacggcttctcccagccctacctgctgctcccggaggcggcaccggcccaggcccaggccgacttgctcaccgtctacctggtggtggcattggcctcggtgtcttcgctcttcctcttctcggtgctcctgttcgtggcggtgcggctgtgcaggaggagcagggcggcctcggtgggtcgctgctcggtgcccgagggcccctttccagggcagatggtggacgtgagcggcaccgggaccctgtcccagagctaccagtacgaggtgtgtctgactggagaatccgggacaaatgagttcaagttcctgaagccaattatccccaacttcgttgctcagggtgcagagagggttagcgaggcaaatcccagtttcaggaagagctttgaattcacttaagtgttaataaggatctactgaggctagtctcgtttaatttgtggaaagtccttttttactgctttgcccattggaggtgtctccttttattagaaagtaaccatcttattccaattctatgcatgttactggtatttataaatgtatgagtttttttgcggtataataaatgtaaattttctttgtattctaaaaaaaaaaaaaaaaaaaaaa

SEQ ID NO: 153 - DNA, 3403 bp, Homo sapiens
gggtccggcccaggaggcttgggcgcgcgcagccatcccgggcctcgccggggacctagggacgcaggcaacgcctgcgcccgctcaccatggtcgagggacgcgtctccgagttcctgaagaaactcggcttctcgggcgggggccgccagtaccaggcgctggagaaggacgaagaggaagccttgattgatgaacagagtgagctgaaagccatcgagaaagagaagaaggtgacagccctgccccccaaggaagcgtgcaaatgccagaaagaggatttggccagagcgttttgtgtggacttacacactgggctgtcggagttctcggtgacgcagcgccggctggcccatggctggaatgagtttgttgctgacaacagcgaacctgtgtggaagaaatacctggatcagtttaagaaccccctgatcctgctgctgctgggctctgccctggtgagtgtcctcaccaaggagtatgaggacgccgtcagcatcgccacggcagtgcttgtcgtggtcactgtcgccttcatccaggagtacaggtcggagaaatctctggaagagctgaccaagatggttcctccagaatgtaactgcctaagagaaggaaaactccagcacctgcttgctcgagaactggttcctggtgatgtcgtatctctctcgatcggagaccggatccctgcagacatccgactcactgaggtcacggacctcttggtggatgaatccagtttcaccggggaagccgagccatgtagtaaaacagacagccccttgacaggcggtggggacctcaccaccctcagcaacatcgtcttcatggggaccctggtgcagtatgggaggggccagggggtcgtgattggaacaggggaaagctctcagttcggagaagtgtttaagatgatgcaggctgaagagacacctaaaactcctttgcagaaaagcatggacaggctaggaaagcaactgacactcttctcctttggcataatcggtctcatcatgctcattggctggtcgcaagggaaacaactcctgagtatgttcacgatcggggtcagcctggctgtggcggccattccagagggtctgcccatcgtcgtcatggtgacgctggtcctgggagtgctgcggatggccaagaagcgggtcatcgtgaagaagttacccatcgtggagactttaggttgctgcagcgttctctgttctgacaagacggggactctgactgccaatgaaatgacagtgacccagcttgtaacgtcagatgggcttcgtgccgaggtcagcggagttgggtatgacggtcaagggactgtgtgtcttctaccatccaaggaagtcattaaggaattttccaatgtctcagtgggaaagttagtggaggcgggctgtgttgccaacaatgcggtcatcagaaagaacgccgtgatggggcagcccaccgagggtgcattgatggccctggcgatgaagatggacttaagtgatattaaaaattcatatataagaaaaaaagagattccattcagttcagagcagaagtggatggcggtgaaatgcagtctgaagactgaggatcaggaagacatttacttcatgaaaggggccttggaagaggtgatccgctactgcaccatgtacaacaacgggggcatccccctgccgctgacgccccagcagaggtcattctgcctgcaggaagagaagaggatggggtcgctcggtttgcgggtgctggccctggcttctgggcccgagctggggcggctgacgtttctcggtcttgtgggcatcattgaccccccgagagttggcgtgaaggaagcagtccaggttctctccgagtctggtgtgtctgtgaagatgataacgggggatgccctggagacggccttggccataggaagaaacatcggcctgtgcaacgggaagctgcaagccatgtccggggaggaggtggacagcgtggagaagggcgagctggccgaccgcgtggggaaggtgtccgtgttcttcaggaccagcccaaagcacaagctcaaaatcatcaaggctctgcaggagtcaggggcgatcgtggccatgactggggatggggtgaacgacgcagtggccctgaagtctgcagacattgggatcgccatggggcagacagggacggacgtcagcaaagaggccgccaacatgatcctggtggatgatgacttctcagccatcatgaatgcagtggaggaaggcaagggtattttttacaacatcaaaaactttgtccgattccagctgagcacgagcatctccgccctgagtctcatcactctgtccaccgtgttcaacctgcccagccccctcaacgccatgcagatcctatggatcaacatcatcatggatgggccaccggcgcagagcttgggggtagagcccgttgacaaagacgccttcaggcagccaccacggagtgtgcgggacaccatcctcagcagagccctcatcctgaagatcctcatgtccgcggccatcatcatcagcgggaccctctttatcttctggaaggagatgcctgaagacagagcaagcactccccgcaccacgacgatgacgttcacttgttttgtgtttttcgatctcttcaacgccttgacctgccgctctcagaccaagctgatatttgagatcggctttctcaggaaccacatgttcctctactccgtcctggggtccatcctggggcagctggcggtcatttacatccccccgctgcagagggtcttccagacggagaacctgggagcgcttgatttgctgtttttaactggattggcctcatccgtcttcattttgtcagagctcctcaaactatgtgaaaaatactgttgcagccccaagagagtccagatgcaccctgaagatgtgtagtggaccgcactccgcggcaccttccctaatcatctcgatctggttgtgactgtggcccctgccgtgtctcctcgtcaggggagacttttaggaggccgcagccttccatcaccggatcagtttttcctcttaggaaagctgcaggaacctcgtgggctccagggacccaggcccacatccatccagcgttcccgctggctgtgggacagacagggaggggcctgtacagaaacaccacactgtttattaaatcacaatgatttttattaaccatgtctaactacgtatctgtgccacagcttgcagtgaggcaggccactcgtggcagatacaaggggctcctgagaggcagtgggtaggatggtcacactctgcccattgccctcctggaggccccatttcctcatcataaaatgagggacttttaaataaagtgctatgccgggggataattaaaaaaaaaaaaaaaaaaa

SEQ ID NO: 154 - DNA, 1891 bp, Homo sapiens
cacttaacagccacttgtttcatcccacctgggcattaggttgacttcaaagatgcctcagttactgcaaaacattaatgggatcatcgaggccttcaggcgctatgcaaggacggagggcaactgcacagcgctcacccgaggggagctgaaaagactcttggagcaagagtttgccgatgtgattgtgaaaccccacgatccagcaactgtggatgaggtcctgcgtctgctggatgaagaccacacagggactgtggaattcaaggaattcctggtcttagtgtttaaagttgcccaggcctgtttcaagacactgagcgagagtgctgagggagcctgcggctctcaagagtctggaagcctccactctggggcctcgcaggagctgggcgaaggacagagaagtggcactgaagtgggaagggcggggaaagggcagcattatgaggggagcagccacagacagagccagcagggttccagagggcagaacaggcctggggttcagacccagggtcaggccactggctctgcgtgggtcagcagctatgacaggcaagctgagtcccagagccaggaaagaataagcccgcagatacaactctctgggcagacagagcagacccagaaagctggagaaggcaagaggaatcagacaacagagatgaggccagagagacagccacagaccagggaacaggacagagcccaccagacaggtgagactgtgactggatctggaactcagacccaggcaggtgccacccagactgtggagcaggacagcagccaccagacaggaagaaccagcaagcagacacaggaggccaccaatgaccagaacagagggactgagacccacggtcaaggcaggagccagaccagccaggctgtgacaggaggacatgctcagatacaggcagggacacacacccagacacccacccagaccgtggagcaggacagcagccaccagacaggaagcaccagcacccagacacaggagtccaccaatggccagaacagagggactgagatccacggtcaaggcaggagccagaccagccaggctgtgacaggaggacacactcagatacaggcagggtcacacaccgagactgtggagcaggacagaagccaaactgtaagccacggaggggctagagaacagggacagacccagacgcagccaggcagtggtcaaagatggatgcaagtgagcaaccctgaggcaggagagacagtaccgggaggacaggcccagactggggcaagcactgagtcaggaaggcaggagtggagcagcactcacccaaggcgctgtgtgacagaagggcagggagacagacagcccacagtggttggtgaggaatgggttgatgaccactcaagggagacagtgatcctcaggctggaccagggcaacttgcataccagtgtttcctcagcacagggccaggatgcagcccagtcagaagagaagcgaggcatcacagctagagagctgtattcctacttgagaagcaccaagccatgacttccccgactccaatgtccagtactggaagaagacagctggagagagtttggcttgtcctgcatggccaatccagtgggtgcatccctggacatcagctcttcattatgcagcttcccttttaggtctttctcaatgagataatttctgcaaggagctttctatcctgaactcttctttcttacctgctttgcggtgcagaccctctcaggagcaggaagactcagagcaagtcacccctttgtactgaattgtcctcatcttgtggggggtttcaggactatttttatctctgacatctctctattgccccatctaccctaatgcatcaataaaaccttaagccgctgg

SEQ ID NO: 155 - DNA, 11415 bp, Homo sapiens
agagaaggagggaagcgggagatttttcttgactgccccctttccttcaaacattttataggcttcagggagagagaggaggaggagagagggaagaaaaaaagaggagagcgagaggggtagagagcgcgcgccgttccctccggagttcccgagctgctgaggagtctggattgtgtctgtccccagtgtcagatgaaagggcgctgaggctcttggccgctgccccgcgcccagctccgcgcacgcccctctgcgagtccggccgcccagcgcctcttcccgcccgagccgccgcctgcgctccggggcagccgctctgtctccagcgcgatgtggcctcgcctggccttttgttgctggggtctggcgctcgtttcgggctgggcgacctttcagcagatgtccccgtcgcgcaatttcagcttccgcctcttccccgagaccgcgcccggggcccccgggagtatccccgcgccgcccgctcctggcgacgaagcggcggggagcagagtggagcggctgggccaggcgttccggcgacgcgtgcggctgctgcgggagctcagcgagcgcctggagcttgtcttcctggtggatgattcgtccagcgtgggcgaagtcaacttccgcagcgagctcatgttcgtccgcaagctgctgtccgacttccccgtggtgcccacggccacgcgcgtggccatcgtgaccttctcgtccaagaactacgtggtgccgcgcgtcgattacatctccacccgccgcgcgcgccagcacaagtgcgcgctgctcctccaagagatccctgccatctcctaccgaggtggcggcacctacaccaagggcgccttccagcaagccgcgcaaattcttcttcatgctagagaaaactcaacaaaagttgtatttctcatcactgatggatattccaatgggggagaccctagaccaattgcagcgtcactgcgagattcaggagtggagatcttcacttttggcatatggcaagggaacattcgagagctgaatgacatggcttccaccccaaaggaggagcactgttacctgctacacagttttgaagaatttgaggctttagctcgccgggcattgcatgaagatctaccttctgggagttttattcaagatgatatggtccactgctcatatctttgtgatgaaggcaaggactgctgtgaccgaatgggaagctgcaaatgtgggacacacacaggccattttgagtgcatctgtgaaaaggggtattacgggaaaggtctgcagtatgaatgcacagcttgcccatcggggacatacaaacctgaaggctcaccaggaggaatcagcagttgcattccatgtcctgatgaaaatcacacctctccacctggaagcacatcccctgaagactgtgtctgcagagagggatacagggcatctggccagacctgtgaacttgtccactgccctgccctgaagcctcccgaaaatggttactttatccaaaacacttgcaacaaccacttcaatgcagcctgtggggtccgatgtcaccctggatttgatcttgtgggaagcagcatcatcttatgtctacccaatggtttgtggtccggttcagagagctactgcagagtaagaacatgtcctcatctccgccagccgaaacatggccacatcagctgttctacaagggaaatgttatataagacaacatgtttggttgcctgtgatgaagggtacagactagaaggcagtgataagcttacttgtcaaggaaacagccagtgggatgggccagaaccccggtgtgtggagcgccactgttccacctttcagatgcccaaagatgtcatcatatccccccacaactgtggcaagcagccagccaaatttgggacgatctgctatgtaagttgccgccaagggttcattttatctggagtcaaagaaatgctgagatgtaccacttctggaaaatggaatgtcggagttcaggcagctgtgtgtaaagacgtggaggctcctcaaatcaactgtcctaaggacatagaggctaagactctggaacagcaagattctgccaatgttacctggcagattccaacagctaaagacaactctggtgaaaaggtgtcagtccacgttcatccagctttcaccccaccttaccttttcccaattggagatgttgctatcgtatacacggcaactgacctatccggcaaccaggccagctgcattttccatatcaaggttattgatgcagaaccacctgtcatagactggtgcagatctccacctcccgtccaggtctcggagaaggtacatgccgcaagctgggatgagcctcagttctcagacaactcaggggctgaattggtcattaccagaagtcatacacaaggagaccttttccctcaaggggagactatagtacagtatacagccactgacccctcaggcaataacaggacatgtgatatccatattgtcataaaaggttctccctgtgaaattccattcacacctgtaaatggggattttatatgcactccagataatactggagtcaactgtacattaacttgcttggagggctatgatttcacagaagggtctactgacaagtattattgtgcttatgaagatggcgtctggaaaccaacatataccactgaatggccagactgtgccaaaaaacgttttgcaaaccacgggttcaagtcctttgagatgttctacaaagcagctcgttgtgatgacacagatctgatgaagaagttttctgaagcatttgagacgaccctgggaaaaatggtcccatcattttgtagtgatgcagaggacattgactgcagactggaggagaacctgaccaaaaaatattgcctagaatataattatgactatgaaaatggctttgcaattggaccaggtggctggggtgcagctaataggctggattactcttacgatgacttcctggacactgtgcaagaaacagccacaagcatcggcaatgccaagtcctcacggattaaaagaagtgccccattatctgactataaaattaagttaatttttaacatcacagctagtgtgccattacccgatgaaagaaatgatacccttgaatgggaaaatcagcaacgactccttcagacattggaaactatcacaaataaactgaaaaggactctcaacaaagaccccatgtattcctttcagcttgcatcagaaatacttatagccgacagcaattcattagaaacaaaaaaggcttcccccttctgcagaccaggctcagtgctgagagggcgtatgtgtgtcaattgccctttgggaacctattataatctggaacatttcacctgtgaaagctgccggatcggatcctatcaagatgaagaagggcaacttgagtgcaagctttgcccctctgggatgtacacggaatatatccattcaagaaacatctctgattgtaaagctcagtgtaaacaaggcacctactcatacagtggacttgagacttgtgaatcgtgtccactgggcacttatcagccaaaatttggttcccggagctgcctctcgtgtccagaaaacacctcaactgtgaaaagaggagccgtgaacatttctgcatgtggagttccttgtccagaaggaaaattctcgcgttctgggttaatgccctgtcacccatgtcctcgtgactattaccaacctaatgcagggaaggccttctgcctggcctgtcccttttatggaactaccccattcgctggttccagatccatcacagaatgttcaagttttagttcaactttctcagcggcagaggaaagtgtggtgccccctgcctctcttggacatattaaaaagaggcatgaaatcagcagtcaggttttccatgaatgcttctttaacccttgccacaatagtggaacctgccagcaacttgggcgtggttatgtttgtctctgtccacttggatatacaggcttaaagtgtgaaacagacatcgatgagtgcagcccactgccttgcctcaacaatggagtttgtaaagacctagttggggaattcatttgtgagtgcccatcaggttacacaggtcagcggtgtgaagaaaatataaatgagtgtagctccagtccttgtttaaataaaggaatctgtgttgatggtgtggctggctatcgttgcacatgtgtgaaaggatttgtaggcctgcattgtgaaacagaagtcaatgaatgccagtcaaacccatgcttaaataatgcagtctgtgaagaccaggttgggggattcttgtgcaaatgcccacctggatttttgggtacccgatgtggaaagaacgtcgatgagtgtctcagtcagccatgcaaaaatggagctacctgtaaagacggtgccaatagcttcagatgcctgtgtgcagctggcttcacaggatcacactgtgaattgaacatcaatgaatgtcagtctaatccatgtagaaatcaggccacctgtgtggatgaattaaattcatacagttgtaaatgtcagccaggattttcaggcaaaaggtgtgaaacagaacagtctacaggctttaacctggattttgaagtttctggcatctatggatatgtcatgctagatggcatgctcccatctctccatgctctaacctgtaccttctggatgaaatcctctgacgacatgaactatggaacaccaatctcctatgcagttgataacggcagcgacaataccttgctcctgactgattataacggctgggttctttatgtgaatggcagggaaaagataacaaactgtccctcggtgaatgatggcagatggcatcatattgcaatcacttggacaagtgccaatggcatctggaaagtctatatcgatgggaaattatctgacggtggtgctggcctctctgttggtttgcccatacctggtatgtttggtggtggtgcgttagttctggggcaagagcaagacaaaaaaggagagggattcagcccagctgagtcttttgtgggctccataagccagctcaacctctgggactatgtcctgtctccacagcaggtgaagtcactggctacctcctgcccagaggaactcagtaaaggaaacgtgttagcatggcctgatttcttgtcaggaattgtggggaaagtgaagatcgattctaagagcatattttgttctgattgcccacgcttaggagggtcagtgcctcatctgagaactgcatctgaagatttaaagccaggttccaaagtcaatctgttctgtgatccaggcttccagctggtcgggaaccctgtgcagtactgtctgaatcaaggacagtggacacaaccacttcctcactgtgaacgcattagctgtggggtgccacctcctttggagaatggcttccattcagccgatgacttctatgctggcagcacagtaacctaccagtgcaacaatggctactatctattgggtgactcaaggatgttctgtacagataatgggagctggaacggcgtttcaccatcctgccttgatgtcgatgagtgtgcagttggatcagattgtagtgagcatgcttcttgcctgaacgtagatggatcctacatatgttcatgtgtcccaccgtacacaggagatgggaaaaactgtgcagaacctataaaatgtaaggctccaggaaatccggaaaatggccactcctcaggtgagatttatacagtaggtgccgaagtcacattttcgtgtcaggaaggataccagttgatgggagtaaccaaaatcacatgtttggagtctggagaatggaatcatctaataccatattgtaaagctgtttcatgtggtaaaccggctattccagaaaatggttgcattgaggagttagcatttacttttggcagcaaagtgacatataggtgtaataaaggatatactctggccggtgataaagaatcatcctgtcttgctaacagttcttggagtcattcccctcctgtgtgtgaaccagtgaagtgttctagtccggaaaatataaataatggaaaatatattttgagtgggcttacctacctttctactgcatcatattcatgcgatacaggatacagcttacagggcccttccattattgaatgcacggcttctggcatctgggacagagcgccacctgcctgtcacctcgtcttctgtggagaaccacctgccatcaaagatgctgtcattacggggaataacttcactttcaggaacaccgtcacttacacttgcaaagaaggctatactcttgctggtcttgacaccattgaatgcctggccgacggcaagtggagtagaagtgaccagcagtgcctggctgtctcctgtgatgagccacccattgtggaccacgcctctccagagactgcccatcggctctttggagacattgcattctactactgctctgatggttacagcctagcagacaattcccagcttctctgcaatgcccagggcaagtgggtacccccagaaggtcaagacatgccccgttgtatagctcatttctgtgaaaaacctccatcggtttcctatagcatcttggaatctgtgagcaaagcaaaatttgcagctggctcagttgtgagctttaaatgcatggaaggctttgtactgaacacctcagcaaagattgaatgtatgagaggtgggcagtggaacccttcccccatgtccatccagtgcatccctgtgcggtgtggagagccaccaagcatcatgaatggctatgcaagtggatcaaactacagttttggagccatggtggcttacagctgcaacaaggggttctacatcaaaggggaaaagaagagcacctgcgaagccacagggcagtggagtagtcctataccgacgtgccacccggtatcttgtggtgaaccacctaaggttgagaatggctttctggagcatacaactggcaggatctttgagagtgaagtgaggtatcagtgtaacccgggctataagtcagtcggaagtcctgtatttgtctgccaagccaatcgccactggcacagtgaatcccctctgatgtgtgttcctctcgactgtggaaaacctcccccgatccagaatggcttcatgaaaggagaaaactttgaagtagggtccaaggttcagtttttctgtaatgagggttatgagcttgttggtgacagttcttggacatgtcagaaatctggcaaatggaataagaagtcaaatccaaagtgcatgcctgccaagtgcccagagccgcccctcttggaaaaccagctagtattaaaggagttgaccaccgaggtaggagttgtgacattttcctgtaaagaagggcatgtcctgcaaggcccctctgtcctgaaatgcttgccatcccagcaatggaatgactctttccctgtttgtaagattgttctttgtaccccacctcccctaatttcctttggtgtccccattccttcttctgctcttcattttggaagtactgtcaagtattcttgtgtaggtgggtttttcctaagaggaaattctaccaccctctgccaacctgatggcacctggagctctccactgccagaatgtgttccagtagaatgtccccaacctgaggaaatccccaatggaatcattgatgtgcaaggccttgcctatctcagcacagctctctatacctgcaagccaggctttgaattggtgggaaatactaccaccctttgtggagaaaatggtcactggcttggaggaaaaccaacatgtaaagccattgagtgcctgaaacccaaggagattttgaatggcaaattctcttacacggacctacactatggacagaccgttacctactcttgcaaccgaggctttcggctcgaaggtcccagtgccttgacctgtttagagacaggtgattgggatgtagatgccccatcttgcaatgccatccactgtgattccccacaacccattgaaaatggttttgtagaaggtgcagattacagctatggtgccataatcatctacagttgcttccctgggtttcaggtggctggtcatgccatgcagacctgtgaagagtcaggatggtcaagttccatcccaacatgtatgccaatagactgtggcctccctcctcatatagattttggagactgtactaaactcaaagatgaccagggatattttgagcaagaagacgacatgatggaagttccatatgtgactcctcaccctccttatcatttgggagcagtggctaaaacctgggaaaatacaaaggagtctcctgctacacattcatcaaactttctgtatggtaccatggtttcatacacctgtaatccaggatatgaacttctggggaaccctgtgctgatctgccaggaagatggaacttggaatggcagtgcaccatcctgcatttcaattgaatgtgacttgcctactgctcctgaaaatggctttttgcgttttacagagactagcatgggaagtgctgtgcagtatagctgtaaacctggacacattctagcaggctctgacttaaggctttgtctagagaatagaaagtggagtggtgcctccccacgctgtgaagccatttcatgcaaaaagccaaatccagtcatgaatggatccatcaaaggaagcaactacacatacctgagcacgttgtactatgagtgtgaccccggatatgtgctgaatggcactgagaggagaacatgccaggatgacaaaaactgggatgaggatgagcccatttgcattcctgtggactgcagttcacccccagtctcagccaatggccaggtgagaggagacgagtacacattccaaaaagagattgaatacacttgcaatgaagggttcttgcttgagggagccaggagtcgggtttgtcttgccaatggaagttggagtggagccactcccgactgtgtgcctgtcagatgtgccaccccgccacaactggccaatggggtgacggaaggcctggactatggcttcatgaaggaagtaacattccactgtcacgagggctacatcttgcacggtgctccaaaactcacctgtcagtcagatggcaactgggatgcagagattcctctctgtaaaccagtcaactgtggacctcctgaagatcttgcccatggtttccctaatggtttttcctttattcatgggggccatatacagtatcagtgctttcctggttataagctccatggaaattcatcaagaaggtgcctctccaatggctcctggagtggcagctcaccttcctgcctgccttgcagatgttccacaccagtaattgaatatggaactgtcaatgggacagattttgactgtggaaaggcagcccggattcagtgcttcaaaggcttcaagctcctaggactttctgaaatcacctgtgaagccgatggccagtggagctctgggttcccccactgtgaacacacttcttgtggttctcttccaatgataccaaatgcgttcatcagtgagaccagctcttggaaggaaaatgtgataacttacagctgcaggtctggatatgtcatacaaggcagttcagatctgatttgtacagagaaaggggtatggagccagccttatccagtctgtgagcccttgtcctgtgggtccccaccgtctgtcgccaatgcagtggcaactggagaggcacacacctatgaaagtgaagtgaaactcagatgtctggaaggttatacgatggatacagatacagatacattcacctgtcagaaagatggtcgctggttccctgagagaatctcctgcagtcctaaaaaatgtcctctcccggaaaacataacacatatacttgtacatggggacgatttcagtgtgaataggcaagtttctgtgtcatgtgcagaagggtatacctttgagggagttaacatatcagtatgtcagcttgatggaacctgggagccaccattctccgatgaatcttgcagtccagtttcttgtgggaaacctgaaagtccagaacatggatttgtggttggcagtaaatacacctttgaaagcacaattatttatcagtgtgagcctggctatgaactagaggggaacagggaacgtgtctgccaggagaacagacagtggagtggaggggtggcaatatgcaaagagaccaggtgtgaaactccacttgaatttctcaatgggaaagctgacattgaaaacaggacgactggacccaacgtggtatattcctgcaacagaggctacagtcttgaagggccatctgaggcacactgcacagaaaatggaacctggagccacccagtccctctctgcaaaccaaatccatgccctgttccttttgtgattcccgagaatgctctgctgtctgaaaaggagttttatgttgatcagaatgtgtccatcaaatgtagggaaggttttctgctgcagggccacggcatcattacctgcaaccccgacgagacgtggacacagacaagcgccaaatgtgaaaaaatctcatgtggtccaccagctcacgtagaaaatgcaattgctcgaggcgtacattatcaatatggagacatgatcacctactcatgttacagtggatacatgttggagggtttcctgaggagtgtttgtttagaaaatggaacatggacatcacctcctatttgcagagctgtctgtcgatttccatgtcagaatgggggcatctgccaacgcccaaatgcttgttcctgtccagagggctggatggggcgcctctgtgaagaaccaatctgcattcttccctgtctgaacggaggtcgctgtgtggccccttaccagtgtgactgcccgcctggctggacggggtctcgctgtcatacagctgtttgccagtctccctgcttaaatggtggaaaatgtgtaagaccaaaccgatgtcactgtctttcttcttggacgggacataactgttccaggaaaaggaggactgggttttaaccactgcacgaccatctggctctcccaaaagcaggatcatctctcctcggtagtgcctgggcatcctggaacttatgcaaagaaagtccaacatggtgctgggtcttgtttagtaaacttgttacttggggttactttttttattttgtgatatattttgttattccttgtgacatactttcttacatgtttccatttttaaatatgcctgtattttctatataaaaattatattaaatagatgctgctctaccctcacaaaatgtacatattctgctgtctattgggaaagttcctggtacacatttttattcagttacttaaaatgatttttccattaaagtatattttgctact

SEQ ID NO: 156 - DNA, 1817 bp, Homo sapiens
attcattactacagggcaggaagggcacgttctcatcagcatgagggagtgcctttccatccacatcggtcaagctggcatccagattggggacgcctgctgggaactctattgcctggaacatggaatccagccaaatggcgttgttcttgacactcaacaggatcagctggaaaatgcaaaaatggagcacacaaatgcatctttcgataccttcttctgtgagacaagagctgggaagcatgtgcctagagcactcttcgtggacttggagccaactgttatagatgggatccggacgggccagcaccgttcactcttccaccccgagcagctccttagcggaaaggaggatgctgccaacaattacgcgcgaggccgttactctgtggggtcggaggtcatcgaccttgtgctggagaggacccggaagctggcagaacagtgtggtggacttcagggatttttgattttccgaagctttggaggaggcactggttcagggtttacgtctctcttaatggagaggctcacaggagaatatagcagaaagactaagctggagttctcggtctacccagcccccaggatctccactgccgtggtagagccttataactctgtcctcaccacccactccaccacagagcacacggactgtaccttcatggtggacaacgaggccgtctatgatatatgccatcgtaaactcggtgttgaatgcccctctcatgccagcatcaatagattggtggttcaggtggtatcttccatcactgcctccctccggtttgaagggcccttgaatgtagacctaattgaattccagaccaacctggtaccttatccgagaatacatttccccatgacagccttcgcccccatcgtctctgctgacaaagcctaccatgagcagttctctgtgtcagacatcaccactgcttgctttgagtcctccaaccagctggtcaagtgtgatcctcggcttgggaagtacatggcctgctgcctactctatagaggggatgtggtccccaaggaagtgaatgcagcaatcgcagccacgaagtcgaggcactctgttcagtttgtagattggtgtccaactggtttcaaggtgggcatcaacaatcggccgcccacggtgatgccgggtggggacctggccaaagtccaccggtccatctgcatgctgagcaacaccacggcgattgtggaggcctgggcccgcctggaccacaagtttgacctcatgtacgccaagagagcatttctgcactggtacctcagagaaggcatggaagaagcagagttcttggaggccagggaagatctggcagccctggagagggactatgaggaagtggcgcaaagtttctgaggcatgtatgatgggtgcaaatgaatgtcaagttaaaatggcatgttttcttttcaagccgttatatgcctagtgggtagttcccctgatgagcagaaaaatgaactcaaatcaggcaagactctaggttccacactaaattaagtgggtcagtaccaacaatgaacacattatttcctggtctactggtacaagtcagctctgctacctgggagcctttggaagcttagagtcctttgaactgctgagtcacttctaggtgggatttttttgttttaccaagagacaatgaaatcctaaagtttatgcttttcctttctggtaccggaagtagaaaacagcacatgttgattacgaatgttttttcccccatgtctacattttttacactgattaaatcataaatattttcagtatgaaaaaaaaaaaaaaaaaa

SEQ ID NO: 157 - DNA, 2428 bp, Homo sapiens; identical to SEQ ID NO: 39

SEQ ID NO: 158 - DNA, 3530 bp, Homo sapiens
gcaatactcagtggataaaaggcttgcagtcccagctgggaaaaagagtcccattatctcccagctgcatagacattccatacggcttggttctgcctggacgcacagcatgcctggctgagagcttgaaacagagttctgcagaaaaactgtaaagatcccgagacatttccctggtaagatctactcttgagatactgactggaagatagactgttttgttccacctgattgtatgggagaaatttttgaccttagaaagtggaaatgaggttgctatggaaactggtaattctgctgccactcataaactcttctgcaggtgatggtcttttaagccgtcctatttttactcaggagccacatgatgtcatttttcctttggatttatcaaaatctgaggtcatcctgaattgtgctgctaatggttacccttcgcctcattataggtggaagcaaaatggcacagacattgattttactatgagttatcactacaggttggatggaggcagtcttgcaatcaatagcccccacacagatcaagatattggcatgtaccagtgcctggccaccaatcttctggggacaattctgagtcggaaggcaaagctccaatttgcatatattgaagactttgaaactaaaacaagaagcacagtatctgtccgagaaggtcaaggtgtggtgcttctctgtggcccaccgccacattttggagatttatcttatgcatggaccttcaatgataaccccttatacgtccaagaggacaataggcgatttgtatctcaagagacgggaaacttgtacattgccaaagtggaaccatcagatgtgggcaactacacttgctttataactaacaaagaggcccagagaagtgttcaaggtccacccactccattagtgcagcgcactgatggtgtgatgggggaatatgaaccaaagattgaagtgcgttttcctgaaactatacaagctgcaaaggattcatctgtaaaactggaatgttttgcccttggaaatccagtccccgatattagttggagaaggttggacgggagcccgttgccagggaaagtcaagtacagcaaatcccaagctatccttgaaatcccgaacttccaacaagaagatgaaggcttttatgagtgcattgcaagcaaccttcgaggaagaaaccttgcaaagggtcaactcattttttatgctcctccagaatgggaacagaaaatccaaaatacacacctctctatctatgacaacttgctctgggaatgtaaagctagtggaaagccaaacccttggtatacatggttaaaaaatggtgaacgactcaacccagaggagagaattcaaatagaaaatgggacactcatcataacgatgctgaatgtgtcagattctggtgtgtaccaatgtgctgcagaaaacaaatatcagataatttatgcaaatgctgaattgagagttttagcctcagctccagatttctccaaaagtccagttaaaaaaaagtcttttgttcaagttggtggggatattgttatcggatgcaaaccaaatgcttttcccagggcagctatctcttggaaaagaggaacggagacccttagacaaagcaaaagaatatttctcttggaggatggcagcctcaagatatataatattaccaggtcagatgctggatcatatacatgcatagccacaaatcagtttggcactgcaaagaacactggcagcctcattgtaaaagagagaactgtcattaccgtcccaccttccaaaatggatgttacagttggcgagagtatagtgctaccatgccaggtgtcccatgacccctccattgaagtggtatttgtatggtttttcaatggagatgtcatagacttaaaaaaaggagtggctcattttgaaaggattggaggagaatctgttggggatttgatgataaggaatattcagttacatcattcaggaaaatatctctgcacagtacaaacaaccctagaaagtttatctgcagtagccgatatcattgttagaggtccaccaggtcctcctgaggatgtgcaagtggaagacatttccagtactacttctcaactaagttggagagcaggcccagataataacagtcccattcaaatatttactattcagactcggacaccattttctgtgggttggcaggctgttgctacagttccagaaattctcaatggtaagacatacaatgcaacagtggttggtttgagtccttgggtggaatatgaatttcgtgttgttgccggcaacagcattgggattggagaaccaagtgaaccatcagaattgttaagaactaaagcatcagtccctgttgtggcaccagtaaacatccatggaggtggaggaagtcggtctgaactcgtcattacgtgggagtcaattccagaagaactgcagaatggggagggatttggatatatcatcatgttccggccagtgggctcgacaacctggtccaaggagaaagtgtcatctgtggaatcatcaaggtttgtctacagaaatgaaagcatcatcccactgtctccctttgaagtcaaagtgggtgtgtataataatgaaggagaaggatccctgagtactgtgaccattgtctactctggggaagatgaacctcaactggccccaaggggaacttctctccagagtttttctgcttctgaaatggaggtttcatggaatgctattgcctggaatagaaacactggaagagtgctgggctatgaggtcttatactggacagatgactccaaagaatccatgataggtaaaattagagtcagtggaaatgtcacaaccaaaaacatcacggggctgaaagctaataccatctactttgcttccgtaagagcttacaacactgctgggacagggccctcaagccccccagtcaatgttaccaccaaaaagtctcctccaagccaaccaccagcaaacattgcctggaagctgacaaactctaaattatgcttgaactgggagcatgtaaaaaccatggaaaatgagtctgaagttttggggtacaagattctgtaccggcaaaacagacagagtaaaactcatattttggaaacaaacaatacatcagctgagcttctggttccatttgaagaagactacttaattgaaataagaacagtcagtgatggtggagatggaagcagcagtgaggaaattaggattccaaaaatgtcaagtttgagttccagaggaattcaattcttagaacctagcacccattttctttccattgtcattgtgatttttcactgttttgctattcagccacttatctgatgaataaaaccataaatctttgagagttttttgaaagcaaatcattctgtatatatgctctccagcctctgacacaagatgcgttcttaatacagacttgtttgcaaagaaaaaaaaaagtatattattaaaatcctgtaaatatctatggtatattaataaaacaattttaaaca

SEQ ID NO: 159 - DNA, 1503 bp, Homo sapiens
cctccctcccttcctcttactctcattcatttcatacacactggctcacacatctactctctctctctatctctctcagaatgacaattctaggtacaacttttggcatggttttttctttacttcaagtcgtttctggagaaagtggctatgctcaaaatggagacttggaagatgcagaactggatgactactcattctcatgctatagccagttggaagtgaatggatcgcagcactcactgacctgtgcttttgaggacccagatgtcaacatcaccaatctggaatttgaaatatgtggggccctcgtggaggtaaagtgcctgaatttcaggaaactacaagagatatatttcatcgagacaaagaaattcttactgattggaaagagcaatatatgtgtgaaggttggagaaaagagtctaacctgcaaaaaaatagacctaaccactatagttaaacctgaggctccttttgacctgagtgtcatctatcgggaaggagccaatgactttgtggtgacatttaatacatcacacttgcaaaagaagtatgtaaaagttttaatgcacgatgtagcttaccgccaggaaaaggatgaaaacaaatggacgcatgtgaatttatccagcacaaaactgacactcctgcagagaaagctccaaccggcagcaatgtatgagattaaagttcgatccatccctgatcactattttaaaggcttctggagtgaatggagtccaagttattacttcagaactccagagatcaataatagctcaggggagatggatcctatcttactaaccatcagcattttgagttttttctctgtcgctctgttggtcatcttggcctgtgtgttatggaaaaaaaggattaagcctatcgtatggcccagtctccccgatcataagaagactctggaacatctttgtaagaaaccaagaaaaaatttaaatgtgagtttcaatcctgaaagtttcctggactgccagattcatagggtggatgacattcaagctagagatgaagtggaaggttttctgcaagatacgtttcctcagcaactagaagaatctgagaagcagaggcttggaggggatgtgcagagccccaactgcccatctgaggatgtagtcatcactccagaaagctttggaagagattcatccctcacatgcctggctgggaatgtcagtgcatgtgacgcccctattctctcctcttccaggtccctagactgcagggagagtggcaagaatgggcctcatgtgtaccaggacctcctgcttagccttgggactacaaacagcacgctgccccctccattttctctccaatctggaatcctgacattgaacccagttgctcagggtcagcccattcttacttccctgggatcaaatcaagaagaagcatatgtcaccatgtccagcttctaccaaaaccagtgaagtgtaagaaacccagactgaacttaccgtgagcgacaaagat

SEQ ID NO: 160 - DNA, 1430 bp, Homo sapiens
cttctctcaccatgagctggctctccagttcccagggagtggtactaacagcctaccaccccagcggcaaggaccaggccgtcgggaacagccatgcaaaggcaggggaggaagccacctcgagtcgcagatatggccagtacactatgaaccaggaaagcaccaccatcaaagttatggagaagcctccatttgatcgatcaatttcccaggattctttggatgaactatctatggaagactattggatagaactagaaaacatcaagaaatctagtgaaaacagccaagaagatcaagaggtggttgttgtcaaagagcctgatgagggagaattggaagaagagtggcttaaagaggccggtttatccaatctcttcggagagtctgctggagatccacaggaaagcattgtgtttttatcaacattgacgcggacccaggcagcagcagttcagaagcgagtagagacggtctcccagaccttgaggaaaaaaaacaaacagtaccagattcctgacgtcagagacatatttgctcaacagagagaatcaaaagaaacagctccaggtggcactgaatcgcagtcacttagaacaaatgaaaacaaataccaaggaagagatgacgaggcatctaaccttgttggtgaagagaagctgatcccacctgaggagacgcctgcccctgaaacagacatcaacctggaggtatcatttgccgagcaagcactcaatcagaaagagagctccaaggagaaaatccagaagagcaaaggcgatgatgccacattacctagtttcagattgccaaaagacaaaacgggtaccacaaggattggtgacctcgcaccccaggacatgaagaaagtttgccatttagccctaattgagctgactgccctctatgatgtattgggtattgagctggaacaacaaaaagctgtgaaaatcaaaacaaaagattctggtcttttttgcgttccattgacagcgctattagaacaagatcagaggaaagtaccaggaatgcgaatacccttgatctttcaaaaactgatttctcgaattgaagagagaggtttggaaacagaaggcctcttacggatccctggagctgccattagaatcaagaatctttgccaagaactagaagcaaagttttatgaagggacttttaattgggaaagtgtcaaacagcatgatgccgccagcctgctgaagctcttcattcgggagttgccccagccactgctcagtgtggagtatctcaaagcctttcaggctgtccagaatcttccaaccaagaagcagcaactacaggctttgaaccttcttgtcatcctcctacctgatgcaaacagggacacactgaaggcccttcttgaatttctccaaagagtaatagataataaaaaaaaaaaaaaaaaa

SEQ ID NO: 161 - DNA, 6619 bp, Homo sapiens
gaattcccttacaaacgcctccagcttgtagaggcggtcgtggaggacccagaggaggagacgaaggggaaggaggcggtggtggaggaggcaaaggccttggacgaccattgttggcgaggggcaccactccgggagaggcggcgctgggcgtcttgggggtgcgcgccgggagcctgcagcgggaccagcgtgggaacgcggctggcaggctgtggacctcgtcctcaccaccatggtcgggctccttttgttttttttcccagcgatctttttggaggtgtcccttctccccagaagccccggcaggaaagtgttgctggcaggagcgtcgtctcagcgctcggtggccagaatggacggagatgtcatcattggagccctcttctcagtccatcaccagcctccggccgagaaagtgcccgagaggaagtgtggggagatcagggagcagtatggcatccagagggtggaggccatgttccacacgttggataagatcaacgcggacccggtcctcctgcccaacatcaccctgggcagtgagatccgggactcctgctggcactcttccgtggctctggaacagagcattgagttcattagggactctctgatttccattcgagatgagaaggatgggatcaaccggtgtctgcctgacggccagtccctccccccaggcaggactaagaagcccattgcgggagtgatcggtcccggctccagctctgtagccattcaagtgcagaacctgctccagctcttcgacatcccccagatcgcttattcagccacaagcatcgacctgagtgacaaaactttgtacaaatacttcctgagggttgtcccttctgacactttgcaggcaagggccatgcttgacatagtcaaacgttacaattggacctatgtctctgcagtccacacggaagggaattatggggagagcggaatggacgctttcaaagagctggctgcccaggaaggcctctgtatcgcccattctgacaaaatctacagcaacgctggggagaagagctttgaccgactcttgcgcaaactccgagagaggcttcccaaggctagagtggtggtctgcttctgtgaaggcatgacagtgcgaggactcctgagcgccatgcggcgccttggcgtcgtgggcgagttctcactcattggaagtgatggatgggcagacagagatgaagtcattgaaggttatgaggtggaagccaacgggggaatcacgataaagctgcagtctccagaggtcaggtcatttgatgattatttcctgaaactgaggctggacactaacacgaggaatccctggttccctgagttctggcaacatcggttccagtgccgccttccaggacaccttctggaaaatcccaactttaaacgaatctgcacaggcaatgaaagcttagaagaaaactatgtccaggacagtaagatggggtttgtcatcaatgccatctatgccatggcacatgggctgcagaacatgcaccatgccctctgccctggccacgtgggcctctgcgatgccatgaagcccatcgacggcagcaagctgctggacttcctcatcaagtcctcattcattggagtatctggagaggaggtgtggtttgatgagaaaggagacgctcctggaaggtatgatatcatgaatctgcagtacactgaagctaatcgctatgactatgtgcacgttggaacctggcatgaaggagtgctgaacattgatgattacaaaatccagatgaacaagagtggagtggtgcggtctgtgtgcagtgagccttgcttaaagggccagattaaggttatacggaaaggagaagtgagctgctgctggatttgcacggcctgcaaagagaatgaatatgtgcaagatgagttcacctgcaaagcttgtgacttgggatggtggcccaatgcagatctaacaggctgtgagcccattcctgtgcgctatcttgagtggagcaacatcgaatccattatagccatcgccttttcatgcctgggaatccttgttaccttgtttgtcaccctaatctttgtactgtaccgggacacaccagtggtcaaatcctccagtcgggagctctgctacatcatcctagctggcatcttccttggttatgtgtgcccattcactctcattgccaaacctactaccacctcctgctacctccagcgcctcttggttggcctctcctctgcgatgtgctactctgctttagtgactaaaaccaatcgtattgcacgcatcctggctggcagcaagaagaagatctgcacccggaagcccaggttcatgagtgcctgggctcaggtgatcattgcctcaattctgattagtgtgcaactaaccctggtggtaaccctgatcatcatggaaccccctatgcccattctgtcctacccaagtatcaaggaagtctaccttatctgcaataccagcaacctgggtgtggtggcccctttgggctacaatggactcctcatcatgagctgtacctactatgccttcaagacccgcaacgtgcccgccaacttcaacgaggccaaatatatcgcgttcaccatgtacaccacctgtatcatctggctagcttttgtgcccatttactttgggagcaactacaagatcatcacaacttgctttgcagtgagtctcagtgtaacagtggctctggggtgcatgttcactcccaagatgtacatcattattgccaagcctgagaggaatgtccgcagtgccttcaccacctctgatgttgtccgcatgcatgttggcgatggcaagctgccctgccgctccaacactttcctcaacatcttccgaagaaagaaggcaggggcagggaatgccaattctaatggcaagtctgtgtcatggtctgaaccaggtggaggacaggtgcccaagggacagcatatgtggcaccgcctctctgtgcacgtgaagaccaatgagacggcctgcaaccaaacagccgtcatcaaacccctcactaaaagttaccaaggctctggcaagagcctgaccttttcagataccagcaccaagaccctttacaacgtagaggaggaggaggatgcccagccgattcgctttagcccgcctggtagcccttccatggtggtgcacaggcgcgtgccaagcgcggcgaccactccgcctctgccgccccacctgaccgcagaggagacccccctcttcctggccgaaccagccctccccaagggcttgccccctcctctccagcagcagcagcaaccccctccacagcagaaatcgctgatggaccagctccagggagtggtcagcaacttcagtaccgcgatcccggattttcacgcggtgctggcaggccccgggggtcccgggaacgggctgcggtccctgtacccgcccccgccaccgccgcagcacctgcagatgctgccgctgcagctgagcacctttggggaggagctggtctccccgcccgcggacgacgacgacgacagcgagaggtttaagctcctccaggagtacgtgtatgagcacgagcgggaagggaacacggaagaagacgaactggaagaggaggaggaggacctgcaggcggccagcaaactgaccccggatgattcgcctgcgctgacgcctccgtcgcctttccgcgactcggtggcctcgggcagctcggtgcccagctccccagtgtccgagtcggtgctctgcacccctcccaacgtatcctacgcctctgtcattctgcgggactacaagcaaagctcttccaccctgtaagggggaagggtccacatagaaaagcaagacaagccagagatctcccacacctccagagatgtgcaaacagctgggaggaaaagcctgggagtggggggcctcgtcgggaggacaggagaccgctgctgctgctgccgctactgctgctgctgccttaagtaggaagagagggaaggacaccaagcaaaaaatgttcaggccaggattcggattcttgaattactcgaagccttctctgggaagaaagggaattctgacaaagcacaattccatatggtatgtaacttttatcacaaatcaaatagtgacatcacaaacataatgtcctcttttgcacaattgtgcatagatatatatatgcccacacacactgggccatgcttggcaaggaacagaccacgtggcatccagtcggatcatgagttcacctgatgcattcggagtgagctggtggagccagacagagcaggtgcggggaagggaagggccaggccagacccatcccaaacggatgatgggatgatgggacagcagttccttgctcagaagcccttctccccgctgggctgacagactcctcatcttcaggagactcaggaatggagcggtacaggggtctctcttcatccaccgcaacccatccagtgccagctttgagattgcacttgaagaaaggtgcatggaccccctgctgctctgcagattccctttatttaggaaaacaggaataagagcaaaattatcaccaaaaagtgcttcatcaggcgtgctacaggaggaaggagctagaaatagaacaatccatcagcatgagactttgaaaaaaaaaacacatgatcagcttctcatgttccatattcacttattggcgatttggggaaaaggccggaacaagagattgttacgagagtggcagaaacccttttgtagattgacttgtgtttgtgccaagcgggctttccattgaccttcagttaaagaacaaaccatgtgacaaaattgttaccttccacttactgtagcaaataatacctacaagttgaacttctaagatgcgtatatgtacaatttggtgccattatttctcctacgtattagagaaacaaatccatctttgaatctaatggtgtactcatagcaactattactggtttaaatgacaaataattctatcctattgtcactgaagtccttgtaactagcgagtgaatgtgttcctgtgtccttgtatatgtgcgatcgtaaaatttgtgcaatgtaatgtcaaattgacctgtcaatgtcaacctagtagtcaatctaactgcaattagaaattgtcttttgaatatactatatatattttttatgttccaataatgttttatacatcattgtcatcaatatctacagaagctctttgacggtttgaatactatggctcaaggttttcatatgcagctcggatggacatttttcttctaagatggaacttatttttcagatattttctgatgtggagatatgttattaatgaagtggtttgaaaatttgttatattaaaagtgcacaaaaactgagagtgaaaataaaaggtacattttataagcttgcacacattattaacacataagattgaacaaagcatttagattattccaggttatatcatttttttaaagattttccacagctacttgagtgtctaacatacagtaacatctaactcagctaataatttgtaaaatctttatcaatcacattgtggcctcttttaatttttatgttcatggacttttattcctgtgtcttggctgtcataactttttatttctgctatttgctgttgtgtaatatccatggacatgtaatccacttactccatctttacaatccctttttaccaccaataaaaggattttttcttgctgttttgatttcttctattatttgtggaatgaattataccccccttaaatatctttgtttatgccttatgttcagtcatattttaatatgcttccttcatattgaagctgctgatttctcagccaaaaatcatcttagaatctttaaatatccattgcatcatttgttcagaatttaacatccattccaatgttggaggcttgtattacttatatttcatcatattctattgccaagtttagtcagttccacaccaagaatgaactgcatttcctttaaaaattattttaaaacacctttattgaaaagatctcatgactgagatgtggactttggttccatgttttcattgtaagaaagcagagagcggaaaatcaatggctccagtgattaatagatgggtttttagtaattgacaaattcatgagggaaagcatatgatctctttattagtgaatcatgcttattttttactcttaacgccactaatatacatccctaatatcacagggcttgtgcattcagatttttaaaaaattaggatagataaggaaacaacttatattcaagtgtaagatgatatcaggttggtctaagacttttggtgaacacgttcattcaactgtgatcactttattactctgaatgcctactattatcctgattatggggtctcctgaataaatagagtattagtctttatgtcatcattgttcaaaattggagatgtacacatacataccctataccaagagggccgaaactcttcaccttgatgtatgttctgatacaagttgttcagcttcttgtaaatgtgttttccttcggcttgttactgccttttgtcaaataatcttgacaatgctgtataataaatattttctatttatt

SEQ ID NO: 162 - DNA, 6633 bp, Homo sapiens
cggcgccgcgcggccgcgctagaatggaggcgcccagcggcagcgagcccggcggcgacggggccggggactgcgcccacccggacccccgggcccctggcgccgcggcgcccagctccggccccggcccgtgcgcggccgcccgggagtccgagcgccagctgcgcctccgcctctgcgtcctcaacgagatcttgggcaccgagagggactacgtgggcaccttgcgcttcttgcagtcggcattcctgcatcgcatccggcagaacgtggccgactcagtggagaagggcctcacggaggagaatgtcaaggtcctgttctcgaacatcgaagacatcctggaagttcataaggatttcttggccgccttggagtattgtttacacccggagccgcagtctcagcatgaacttgggaatgttttcttaaaattcaaggacaagttctgcgtgtacgaggagtattgcagcaaccatgagaaagccctgaggctgctggtggagctgaacaagatccctaccgtgcgcgccttccttttgagctgcatgcttctgggaggccggaagaccacggacatccctttggaaggctacctgttgtctccgatccagaggatctgcaagtacccgctcctccttaaggagctggccaagaggactcccggcaagcacccagaccaccccgcggtccagagtgccctgcaggccatgaagaccgtttgctccaacatcaatgagaccaagcggcagatggagaagctggaagccctggagcagctgcagtcccacatcgaaggctgggagggttccaacctcacagacatctgcactcagctcctcctgcaagggactttgttaaagatctctgcgggcaacatccaggaaagggccttcttcctcttcgacaaccttctcgtctactgcaagcggaaatccagggtcaccgggagcaagaagtccaccaagaggaccaaatccatcaacggctccctctacatcttcaggggtcgaatcaacactgaagtcatggaggtggagaatgtggaagatgggacagcggattaccatagcaacggctataccgtcaccaacggctggaagatccacaacacggccaagaataagtggtttgtctgcatggccaagacggcagaggagaagcagaagtggctggatgccatcatccgcgagcgggagcagcgcgagagcctgaagctgggcatggagcgtgatgcctacgtcatgattgcggagaagggggagaagctgtaccacatgatgatgaacaagaaggtgaacctcatcaaggaccgccggagaaagctgagcactgtccccaagtgctttcttggcaatgagttcgttgcctggctcctagaaattggtgaaatcagcaagacggaagaaggagtcaacttgggccaagccctgttggagaatggcatcatccaccatgtttccgacaagcaccagttcaagaatgagcaggtgatgtatcgcttccgctacgacgatggcacctacaaggcccgaagtgagctggaggacatcatgtccaagggtgtgaggctttactgccgtcttcacagcctctacaccccggtgatcaaagaccgtgattaccacctgaagacctacaagtcagtgcttcccgggagcaagctggtggactggctgctggctcagggagactgccagactcgggaggaggcagtggcgctcggcgtgggtctgtgcaacaatggcttcatgcaccacgtgctggagaagagcgagttcagggatgagtcccagtacttccgctttcatgctgacgaggagatggaggggaccagcagcaagaacaaacagcttcgcaacgacttcaagctggtggagaacattctggccaagcgcctgctgatcctgccccaggaggaggactatggctttgacatcgaggagaagaacaaggctgtggtggtgaagtccgtccagaggggctcgctggctgaggtggctggcctgcaggtggggaggaagatctactccatcaatgaggacctggtgttcctgcggccgttttcagaggtggagtccatcctcaaccagtccttctgctcccgccgccctctgcgcctcctggtggccacgaaggccaaagagatcatcaaaatccccgaccagccggacacactgtgcttccagattcgtggagctgccccaccgtacgtctatgctgtggggagaggctctgaggccatggctgcagggctctgtgctggtcagtgcattctgaaggtcaatggcagcaacgtgatgaacgatggtgcccctgaggtcctggagcacttccaggcattccggagtcggcgcgaagaggccctgggcctgtaccagtggatctaccacacccatgaggatgcccaggaagcacgagccagtcaggaggcctccactgaggaccccagtggcgagcaggcccaggaggaagaccaggctgattcagccttcccactgctgtccctgggtccccggctgagcctgtgtgaggacagccccatggtcaccctgactgtggacaacgtgcacctggaacacggcgtggtgtatgagtatgtgagcacggcaggcgtcaggtgccatgtgctggagaagatcgtggagccccgcggctgcttcggcctcaccgccaagatcctcgaggcctttgctgccaatgacagcgtcttcgtggagaactgcaggcggctcatggccctgagcagcgccatcgtgaccatgccccactttgagttccgcaacatctgtgacaccaagctggagagcattggccagaggattgcctgctaccaggagtttgcagcccaactgaagagcagggtcagcccacccttcaaacaagcccccctggagccccacccgctgtgtggcctggacttctgccccaccaattgccacatcaacctcatggaagtgtcctaccccaagaccaccccctcagtgggcaggtccttcagcatccgctttggacgcaaaccctccctcatcggccttgacccggagcaaggccacctgaaccccatgtcgtacacccagcactgcatcaccaccatggctgctccctcctggaagtgcttgcctgctgcagagggtgatccccaaggccagggtctccatgatggcagcttcgggccagccagtgggacccttggtcaggaagaccggggcctcagcttcctactcaagcaggaggaccgtgagatccaggatgcctacctgcagctcttcaccaagctggatgtggccctgaaggagatgaagcaatatgtcacccagatcaacaggctgctgtccaccatcacagagcccacctcgggtgggtcctgcgacgcatccttggctgaggaggcctcctccctgcccctggtcagtgaagagagcgagatggacaggagtgaccatgggggcatcaagaaggtgtgcttcaaggtggccgaggaggaccaggaggactcaggccacgacaccatgagttatcgcgactcctacagcgagtgtaacagcaatcgagactcggtcctgtcctacaccagcgtgagaagtaacagctcctacttgggcagcgacgagatggggtctggagatgagctgccctgtgacatgcggatcccatctgacaagcaggacaagcttcatggctgcctggagcacctctttaaccaggtggactccatcaatgctctcctcaaggggccagtcatgagccgggctttcgaagagaccaagcatttccctatgaaccacagcttacaagagtttaaacagaaagaagagtgtacaatccgtggccggagcctgatccagattagcatccaggaggacccctggaacctccccaactccatcaagaccctggtggacaacattcagagatatgtggaagatgggaagaaccagctgctcctggccttgctgaagtgcacagacacggagctgcagctgcgcagagacgcgatcttctgccaggccctggtggccgccgtgtgcaccttctccgagcagctgctggcggccctgggctaccgctacaacaacaatggcgagtacgaggagagcagccgcgacgccagccgcaagtggctggagcaggtggcggccacgggcgtcctgctgcactgccagtccctgctctcgccagccacagtgaaggaggaacggaccatgctggaggacatctgggtgacgctgtcagagctggacaatgtcaccttctcctttaagcagctggacgagaactatgtggccaacaccaacgtcttctaccacattgagggcagccggcaggcgctgaaggtcatcttctacctcgacagctaccacttctccaagctgccctcccgcctggagggtggggccagcctgaggctgcacacagcgctgttcacgaaagtgctggagaacgtggaggggctgccttctccaggcagccaggccgcggaggatttgcagcaggacatcaacgcgcagtccctggagaaagttcagcagtattaccgcaaactcagggcattttacctggagcggtctaacctgcccacggatgccagcaccacggcggtaaagatagaccagctgatccgccccatcaatgccctggatgagctctgccgcctcatgaagtcctttgtccacccaaagcctggtgctgctgggagtgtgggcgccggcctcatccccatctcctcggagctctgctaccgcctgggggcctgccagatggtcatgtgtggcacaggcatgcagaggagcaccctgagcgtgtccctggagcaggcggccatcttggcacggagccacgggttgctgcccaagtgcatcatgcaggccacggacatcatgcggaagcagggcccaagggtggagattctggccaaaaacctgcgagtcaaggaccagatgccccagggtgctccgcgcctctaccgcctctgccagccgccggtggatggggacctctgaacacccaaatgccccacgctgggccgcggcctctggagctgggatttgggaggacacagcaggcagcgctggccttctccagggatggcccaaggcttccgcagccgcccgttccgggacctgcccagcgtcctccctgcctccttccgggacaagcctggccaccctcgctgtgatgacgagctggctgattggccctgggccggcccattcttcacacgcctgccagaagctggaggggtgctggagacccatagagctgatgggagcagctggtgcctggccttcggctcctgcgtccccagaacccaagggaacgtcatggaggccacatggggccacccggctccctcgggatggctccgcctgcacttttgaaaccccggtttccttcaacgtccacattccaggtgaccacacgtgtctcctcctcctcatcttagcttccaggttcaccctaaccctgtactaacctgcttggtggacttggaaaagacttggctctgtcgggaaaggagagacggggcctccatcacgcctgttaccagaggatccccgagagccacaccagctctggacatcaccgcccctggaactggggccaccagccctgggcacgagatttgctctgactttatttatatggcatgaaatctctggtttattttgggattttttgttgttggtgttgtcaaagtttgttttttctaaagttgtgtgattatatatttgacattttacatttcaaagaaaggtatgttgtctaacaggggaccaacagaaggtagtattgacaactgttcctgcttctactaaaaaaaaaagagcacaaaagaaaaactaaattattgaaaaattaaaaaatgtcattgtttcctgtttgttaatattagggttgtaaggtgtcgttttgaggtatcgactgtgattccttcccccaccctccattctccagcggttggccggtgttagaactcgctctctttgagtgactggctacaagggcctgagaggtggccagccagggttggagctggaggggatggagccccacctgaggtgccgtgtcacacgggttagagggtcactgggaaacaccgggcggtggcttctgtgatttattttcttgatggtaacttctcagagcagggcgattgggacatcaccagccagagcacaggaagccaccctgcctgctggggaggagggacccacacaagccccctcggcagtttgtccccccagcttcggtatgccttcagggaaaggtcacagctggggaggaagcggggggacgcctgtcacccctggcaggtggtgagttcaggtgggggctccctgctgcccccaggcctgggagcttgaagccctcccggcatctggcatccgagcctcccgccctccagggtgcgcttccctctcttgccgcagcatacacgagggcaggcagtggccttgtcactgtatcttgcatcagagacaaaggaggacccgctttagccctgctgcgggaaatgggggagggcccagggccagcgcattgtgcactggtttactttaaaatgtacagattcttctcgttaaattcttgatagattttttattattattaaaagtcagtttataatac

SEQ ID NO: 163 - DNA, 3808 bp, Homo sapiens
accatctactccacagtcagcacatccacaactgccatcacctcacattttactacctcagagactgcggtgactcccacacctgtaaccccatcttctctgagtacagacatcccgaccacaagcctacgaactctcaccccttcgtctgtgggcaccagcacttcattgactacaaccacagactttccctctatacccactgatatcagtaccttaccaactcgaacacacatcatttcatcttctccctccatccaaagtacagaaacctcatcccttgtgggcaccacctctcccaccatgtccactgtgagaatgaccctcagaattactgagaacaccccaatcagttcctttagcacaagtattgttgttatacctgaaaccccaacacagacccctcctgtactgacgtcagccactgggacccaaacatctcctgcacctactactgtcacctttggaagtacggattcctccacgtccactcttcatactcttactccatcaacagccttgagcacgatcgtgtcaacatcacaggttcctattcctagcacacattcctccacccttcaaacaactccttctactccctcattgcaaacttcactcacatctacaagtgagttcactacagaatctttcactaggggaagtacgtctacaaatgcaatcttgacttcttttagtaccatcatctggtcctcaacacccactattatcatgtcctcttctccatcttctgccagcataactccagtgttctccactaccattcattctgttccttcttcaccatacattttcagtacagaaaatgtgggctccgcttctatcacaggctttcctagtctctcttcctctgcaactaccagcacttcttcaaccagctcctctctgaccacagctctcactgaaataacccccttttcttatatttcccttccctccaccacaccctgtccaggaactataacaattaccatagtccctgcctctcccactgatccatgtgttgaaatggatcccagcactgaagctacttctcctcccaccaccccattaacagtctttccctttactaccgaaatggtcacctgtcctacctccatcagtatccaaactactcttactacatatatggacacttcttccatgatgccagaaagtgagtccagcatctcacccaatgcttccagttccactggcactgggactgtacccacaaacacagttttcacaagtactcgactgcccaccagtgagacctggctgagcaacagttctgtgatccccctacctcttcctggcgtctctaccatcccgctcaccatgaaaccaagcagtagcctcccgaccatcctgaggacttcaagcaagtcaacacacccctccccacccaccactaggacttcagagacaccagtggccactacccagactcctaccacccttacatcacgcaggacaactcgcatcacttctcagatgaccacacagtccacgttgaccaccactgcaggcacctgtgacaatggtggcacctgggaacagggccagtgtgcttgccttccggggttttctggggaccgctgtcagctccagaccagatgccagaatgggggtcagtgggatggcctcaaatgccagtgccccagcaccttctatggttccagttgtgagtttgctgtggaacaggtggatctagatgtagtggagaccgaggtgggcatggaagtgtctgtggatcagcagttctcgccggacctcaatgacaacacttcccaggcctacagggatttcaacaagaccttctggaatcagatgcagaagatttttgcagacatgcagggcttcaccttcaagggtgtggagatcctgtccctgaggaatggcagcatcgtggtggactacctggtcctgctggagatgcccttcagcccccagctggagagcgagtatgagcaggtgaagaccacgctgaaggaggggctgcagaacgccagccaggatgtgaacagctgccaggactcccagaccctgtgttttaagcctgactccatcaaggtgaacaacaacagcaagacagagctgaccccggcagccatctgccgccgcgccgctcccacgggctatgaagagttctacttccccttggtggaggccacccggctccgctgtgtcaccaaatgcacgtctggggtggacaacgccatcgactgtcaccagggccagtgcgttctggagacgagcggtcccacgtgtcgctgctactccaccgacacgcactggttctctggcccgcgctgcgaggtggccgtccactggagggcgctggtcgggggcctgacggccggcgccgcgctgctggtgctgctgctgctggcgctgggcgtccgggcggtgcgctccggatggtggggcggccagcgccgaggccggtcctgggaccaggacaggaaatggttcgagacctgggatgaggaagtcgtgggcactttttcaaactggggtttcgaggacgacggaacagacaaggatacaaatttctatgtggccttggagaacgtggacaccactatgaaggtgcacatcaagagacccgagatgacctcgtcctcagtgtgagccctgcggggccccttcaccaccccctccgccctgccccggatacaagggtctgcattgcgtccatttcgagaggtggccccaggacgcgggcagcccaggctcctgctgttcttgggcaagatgagactgttcccccaaatcccatccttctccttccaacttggctgaaacccacctggagacgcagttcacgtccaggctcttccactgtggaatcttgggcaagacagtaacgagcctcagtttcctcacctgcaaaacgggtacagcattcctgtatgatagctcacgccgttgttgtgaaaaccacatagacttggtcaattctcggtcctaccctgccctcccgtctcagccctcgtgttgccattgcctctctcggatcctccaatcctcacgtccttcacctggtctctggccctggttcttattttctctcaattccctactgcctgtttcttactctgaacctggaggcaacctgcagccccatcccatctcctgccctctcctgatctaactccctgctgcatctcttgctctcattccttagacgtcctccccttttgaccccgttccttcatccatcctgcaccccagtcccccagccctaaatcctccctcctctcctcacatcctggtccctagcaaggtatagatagcctctgtgtcttaggataccccgggtgctgttccctcggtcaccctgttgcccagttccccgtttctcttgctctcattccttgtatcctttccccttttgagcccgtccattcatcggttctgcccccgactcccccagccctaaataccccagctgctgttccccccatcaccctgctgcccaattctttattctccacccctttctctcacccctggagccctgcgggtgggggcagggcatgagttccccagtccccaaggaaaggcagccccctcagtctccctcctcctcattcccttccatctccctcccctctgccttttaaacccatcccctccgattcccctcctcccccctctctccctggtgtcacctggattcctgcagtaattctgagcccttgaaatcctcagtcgccttggcggggaagattggctttggggacaggaagtcggcacatctccaggtcttcatgtgcacaatatagagtttattgtaaaaagc

SEQ ID NO: 164 - DNA, 6901 bp, Homo sapiens
ccaaaaataaaaccgtccgggtccccttcagacggctgcaggcacagggaggaggcgcgaaggtgcagcagccgtgcgagcccagctggagtaggagcgcggactcgaggctcggggcgcgcagccctcgttccgccgagagccgggcccccagtcggccgcttcagggccccctagactcagagaagctggccgccgggcggggccgggagaacagcccgcgggcgtccagcgtgccgaccacaaagctcttcgcggtgcccgcgcgcaccactctccagccgccccgcgccatgaggccgcggaccaaagcccgcagcccggggcgcgccctgcggaacccctggagaggcttcctgccgctcaccctggctctcttcgtgggcgcgggtcatgcccaaagggaccccgtagggagatacgagccggctggtggagacgcgaatcgactgcggcgccctgggggcagctacccggcagcggctgcagccaaggtgtacagtctgttccgggagcaggacgcgcctgtcgcgggcttgcagcccgtggagcgggcccagccgggctgggggagccccaggaggcccaccgaggcggaggccaggaggccgtcccgcgcgcagcagtcgcggcgtgtccagccacctgcgcagacccggagaagcactcccctgggccagcagcaaccagcaccccggacccgggccgcgccggctctcccacgcctggggaccccacagcggtctggggctgcgcccccaaccccgccgcgagggcgactcacggggaggaacgtctgcgggggacagtgctgcccaggatggacaacagcaaacagcaccaaccactgtatcaaacccgtttgcgagccgccgtgccagaaccggggctcctgcagccgcccgcagctctgtgtctgccgctctggtttccgtggagcccgctgcgaggaggtcattcccgatgaggaatttgacccccagaactccaggctggcacctcgacgctgggccgagcgttcacccaacctgcgcaggagcagtgcggctggagagggcaccttggccagagcacagccgccagcaccacagtcgccgcccgcaccacagtcgccaccagctgggaccctgagtggcctcagccagacccacccttcccagcagcacgtggggttgtcccgcactgtccgacttcacccgactgccacggccagtagccagctctcttccaacgccctgcccccgggaccaggccttgagcagagagatggcacccaacaggcggtacctctggagcacccctcatccccctgggggctgaacctcacggagaaaatcaagaagatcaagatcgtcttcactcccaccatctgcaagcagacctgtgcccgtggacactgtgccaacagctgtgagaggggcgacaccaccaccctgtacagccagggcggccatgggcacgatcccaagtctggcttccgcatctatttctgccagatcccctgcctgaacggaggccgctgcatcggcagggacgaatgctggtgccccgccaactccaccgggaagttctgccacctgcctatcccgcagccggacagggagcctccagggagggggtcccgccccagggccttgctggaagccccactgaagcagtccactttcacactgccgctctccaaccagctggcctccgtgaacccctccctggtgaaggtgcacattcaccacccacccgaggcctcagtgcagatccaccaggtggcccaggtgcggggcggggtggaggaggccctagtggagaacagcgtggagaccagacccccgccctggctgcctgccagccctggccacagcctctgggacagcaacaacatccctgctcggtctggagagccccctcggccactgcccccagcagcacccaggcctcgaggactgctgggccggtgttacctgaacactgtgaacggacagtgtgccaaccctctgctggagctgactacccaggaggactgctgtggcagtgtgggagccttctggggggtgactttgtgtgccccatgcccacccagaccagcctccccggtgattgagaatggccagctggagtgtcctcaggggtacaagagactgaacctcactcactgccaagatatcaacgagtgcttgaccctgggcctgtgcaaggacgcggagtgtgtgaataccaggggcagctacctgtgcacatgcagacctggcctcatgctggatccatcgcggagccgctgtgtgtcggacaaggcaatctccatgctgcagggactgtgctaccggtcgctggggcccggcacctgcaccctgcctttggcccagcggatcaccaagcagatatgctgctgcagccgcgtgggcaaagcatggggcagcgagtgtgagaaatgccctctgcctggcacagaggccttcagagagatctgccctgccggccacggctacacctacgcgagctccgacatccgcctgtccatgaggaaagccgaggaggaggaactggcaaggcccccaagggagcaagggcagaggagcagcggggcactgcccgggccagcagagaggcagcccctccgggtcgtcacggacacctggcttgaggccgggaccatccctgacaagggtgactctcaggctggccaggtcacgaccagtgtcactcatgcacctgcctgggtcacagggaatgccacaaccccaccaatgcctgaacaggggattgcagagatacaggaagaacaagtgaccccctccaccgatgtgctggtgaccctgagcaccccaggcattgacagatgcgctgctggagccaccaacgtctgtggccctggaacctgcgtgaacctccccgatggatacagatgtgtctgcagccctggctaccagctgcaccccagccaggcctactgcacagatgacaacgagtgtctgagggacccctgcaagggaaaagggcgctgcatcaaccgcgtggggtcctactcctgcttctgctaccctggctacactctggccacctcaggggcgacacaggagtgtcaagatatcaatgagtgtgagcagccaggggtgtgcagcggggggcagtgcaccaacaccgagggctcgtaccactgcgagtgtgatcagggctacatcatggtcaggaaaggacactgccaagatatcaacgaatgccgtcaccccggtacctgccctgatgggagatgcgtcaattcccctggctcctacacttgtctggcctgtgaggagggctaccggggccagagtgggagctgtgtagatgtgaatgagtgtctgactcccggggtctgtgcccatggaaagtgcaccaacctagaaggctccttcagatgctcttgtgagcagggctatgaggtcacctcagatgagaagggctgccaagatgtggatgagtgtgccagccgggcctcatgccccacaggcctctgcctcaacacggagggctccttcgcctgctctgcctgtgagaacgggtactgggtgaatgaagacggcactgcctgtgaagacctagatgagtgtgccttcccgggagtctgcccctccggagtctgcaccaacacggctggctccttctcctgcaaggactgcgatgggggctaccggcccagccccctgggtgactcctgtgaagatgtggatgaatgtgaagacccccagagcagctgcctgggaggcgagtgcaagaacactgtgggctcctaccagtgcctctgtccccagggcttccagctggccaatggcaccgtgtgtgaggatgtgaatgagtgcatgggggaggagcactgcgcaccacacggcgagtgcctcaacagccacgggtctttcttctgtctgtgcgcgcctggcttcgtcagcgcagaggggggcaccagctgccaggatgtggacgagtgtgccaccacagacccgtgtgtgggagggcactgtgtcaacaccgagggctccttcaactgtctatgtgagactggcttccagccctccccagagagtggagagtgtgtggatattgacgagtgtgaggactatggagacccggtgtgtggcacctggaagtgtgaaaacagccctggctcctaccgctgtgttctgggctgccagcctggcttccacatggccccgaacggagactgcattgacatagacgagtgcgccaacgacaccatgtgtggcagccacggcttctgtgacaacactgatggctccttccgctgcctctgtgaccagggcttcgagatctctccctcaggctgggactgtgtggatgtgaacgagtgtgagcttatgctggcggtatgtggggccgcgctctgtgagaacgtggagggctccttcctgtgcctctgtgccagtgacctggaggagtacgatgcccaggaggggcactgccgcccacggggggctggaggtcagagtatgtctgaggccccaacgggggaccatgccccggcccccacccgcatggactgctactccgggcagaagggccatgcgccctgctccagtgtcctgggccggaacaccacacaggctgaatgctgctgcacccagggcgctagctggggagatgcctgtgacctctgcccgtctgaggactcagctgaattcagcgagatctgccctagtggaaaaggctacattcctgtggaaggagcctggacgtttggacagaccatgtacacagatgcggatgagtgtgtgatattcgggcctggtctctgcccgaacggccggtgcctcaacaccgtgcctggttatgtctgcctgtgcaatcccggcttccactacgatgcttcccacaagaagtgtgaggatcacgatgagtgccaggacctggcctgtgagaatggcgagtgcgtcaacacggagggctccttccactgcttctgcagccccccgctcaccctggacctcagccagcagcgctgcatgaacagcaccagcagcacggaggacctccctgaccacgacatccacatggacatctgctggaaaaaagtcaccaatgatgtgtgcagcgaacccctgcgtgggcaccgcaccacctacacggaatgctgctgccaggacggcgaggcctggagccagcagtgtgctctgtgtcccccgaggagctctgaggtctatgctcagctgtgcaacgtggctcgcattgaggcagagcgggaggccggggtccacttccggccaggctatgagtatggccccgggcccgatgacctgcactacagcatctatggcccagatggggcccccttctacaactacctgggccccgaggacaccgtccctgatcctgccttccccaacacagccggtcactcagcggaccgcacacccatccttgagtctcctttgcagccctcagaactccagccccactacgtggccagccatccagagcccccagccggcttcgaagggcttcaggcggaggagtgcggcatcctgaacggctgtgagaatggccgctgtgtgcgcgtgcgggagggctacacctgtgactgttttgagggcttccagctggatgcggcccacatggcctgcgtagatgtgaatgagtgtgatgacttgaacgggcctgctgtgctctgtgtccatggttactgcgagaacacagagggctcctaccgctgccactgctccccgggatatgtggctgaggcagggcccccccactgcactgccaaggagtagcagtcaggggtcagtgtggcaactacctggaaatggcctccagtcacaggcaggggccttgaggatgatttcctagctgggaagacaccgtgacatcaggccagaggtttccaatcagccttgcctgctttcatctctcccagcttagcctctggctgtaagcttcggtcattgcctccatgcccttgcttggctcaagcaccaccaatcgctttaatgcttcagccaccgcatgaggccctgtccaccacctttcctggccttgctatgggatgcttaccaaaggatggccctcatccaccctcccaagctgtgcgagcatgcaaggccccatggcctcacactgcagacacccctttccagccacaatccaccatcatcctgacgatcccacaactgggacagaggctacatctgccctagggaggtccttcagaatctgtggagcaagaaaggatttggggaagcttggggactgactccagagccccctcctaagaaccatcaccaccactcagccaatctgttctgggccctgattttgccacacctccatcctgtagcccattctctgaccccaaggagtggcagaagatcccttcactcagagaagcaaggctgatattagcttgttgaatgtaagagacacaaatgaagaagaacaaagagcctgagaaagcagcaagaggacatgatgaaaaatacgtggagttgatgagaaaggggagccaaggctttatacgtctaaagaaaatattcagtagctgaatccgcccagtgatagcctgtgggcaccagcagcaagggctgccatgggatacagcacccatctacaaagacctctattacataaacactgcttcttacaggaaacaaacctcttctgggatctccttttgtgaaaaccagtttgatgtgctaaaagtaaaagtctattttccagtgtggtcttgttcagaagcagccagatttccaatgttgtttttcccctccactcagaaacccctgccctttcccttcagaaaacgatggcaggcattcctctgagtttacaagcagagactcactccaacccaaactagctgggagttcagaaccatggtggaataaagaaatgtgcatctagaaaaaaaaaaaaaaaa

SEQ ID NO: 165 - DNA, 1584 bp, Homo sapiens
cgctaagcgtcccagccgcatccctcccgcagcgacggcggcccgggacccgcgggctgtgaaccatgaacacccgcaatagagtggtgaactccgggctcggcgcctcccctgcctcccgcccgacccgggatccccaggacccttctgggcggcaaggggagctgagccccgtggaagaccagagagagggtttggaggcagcccctaagggcccttcgcgggagagcgtcgtgcacgcgggccagaggcgcacaagtgcatacaccttgatagcaccaaatataaaccggagaaatgagatacaaagaattgcggagcaggagctggccaacctggagaagtggaaggagcagaacagagctaaaccggttcacctggtgcccagacggctaggtggaagccagtcagaaactgaagtcagacagaaacaacaactccagctgatgcaatctaaatacaagcaaaagctaaaaagagaagaatctgtaagaatcaagaaggaagctgaagaagctgaactccaaaaaatgaaggcaattcagagagagaagagcaataaactggaggagaaaaaaagacttcaagaaaaccttagaagagaagcatttagagagcatcagcaatacaaaaccgctgagttcttgagcaaactgaacacagaatcgccagacagaagtgcctgtcaaagtgctgtttgtggcccacaatcctcaacatggaaacttcctatcctgcctagggatcacagctgggccagaagctgggcttacagagattctctaaaggcagaagaaaacagaaaattgcaaaagatgaaggatgaacaacatcaaaagagtgaattactggaactgaaacggcagcagcaagagcaagaaagagccaaaatccaccagactgaacacaggagggtaaataatgcttttctggaccgactccaaggcaaaagtcaaccaggtggcctcgagcaatctggaggctgttggaatatgaatagcggtaacagctggggttctctattagttttttcgaggcacctaagggtatatgagaaaatattgactcctatctggccttcatcaactgacctcgaaaagcctcatgagatgctttttcttaatgtgattttgttcagcctcactgtttttaccttaatttcaactgcccacacacttgaccgtgcagtcaggagtgactggcttctccttgtcctcatttatgcatgtttggaggagctgattcctgaactcatatttaatctctactgccagggaaatgctacattatttttctaattggaagtataattagagtgatgttggtagggtagaaaaagagggagtcacttgatgctttcaggttaatcagagctatgggtgctacaggcttgtctttctaagtgacatattcttatctaattctcagatcaggttttgaaaagctttgggggtctttttagattttaatccctactttctttatggtacaaatatgtacaaaagaaaaaggtcttatattcttttacacaaatttataaataaattttgaactccttctgtaaaaaaaaaaaaaaaaaaaaaa

SEQ ID NO: 166 - DNA, 1370 bp, Homo sapiens
aggtgacctccagcccgggcgcccggttcagcgccgccccggccggcgccggtgcctgccaggcactcagggaggcgggggcgcagtggaggaggcggcgccatcgcgaagcgagcgcctcgcccgcactcagccttgccaccccgcccgcagtccaggctggactgggcggcatttgccgaggctcctcggccaggccccgtccgcccgagccgcgctgagacccgggcagcggccgcgtggagaggaggtggcagcggcccgggaggccggagccaagccagcgacccaccatggagacccgctacaacctgaagagtccggctgttaaacgtttaatgaaagaagcggcagaattgaaagatccaacagatcattaccatgcgcagcctttagaggataacctttttgaatggcacttcacggttagagggcccccagactccgattttgatggaggagtttatcacgggcggatagtactgccaccagagtatcccatgaaaccaccaagcattattctcctaacggctaatggtcgatttgaagtgggcaagaaaatctgtttgagcatctcaggccatcatcctgaaacttggcagccttcgtggagtataaggacagcattattagccatcattgggtttatgccaacaaaaggagagggagccataggttctctagattacactcctgaggaaagaagagcacttgccaaaaaatcacaagatttctgttgtgaaggatgtggctctgccatgaaggatgtcctgttgcctttaaaatctggaagcgattcaagccaagctgaccaagaagccaaagaactggctaggcaaataagctttaaggcagaagtcaattcatctggaaagactatctctgagtcagacttaaaccactctttttcactaactgatttacaagatgatatacctacaacattccagggtgctacggccagtacatcgtacggagtccagaattcctcagcagcatcctttcatcaacctacccaacctgtagctaagaatacctccatgagccctcgacagcgccgggcccagcagcagagtcagagaaggttgtctacttcaccagatgtaatccagggccaccagccaagagacaaccacactgatcatggtgggtcagctgtactgattgtcatcctgactttggcattggcagctcttatattccgacgaatatatctggcaaacgaatacatatttgactttgagttataatatggttttgtgacttatgagctgtgactcaactgcttcattaaacattctgcattgggtataatctaaaaaaaaaaaaaaaaaaaaaaaaaaaaaaaaaaaaaaaaaaaaaaaaaaaaa

SEQ ID NO: 167 - DNA, 2076 bp, Homo sapiens
agttgttacatgaaatctgcagtttcataatttccgtgggtcgggccgggcgggccaggcgctgggcacggtgatggccaccactggggccctgggcaactactacgtggactcgttcctgctgggcgccgacgccgcggatgagctgagcgttggccgctatgcgccggggaccctgggccagcctccccggcaggcggcgacgctggccgagcaccccgacttcagcccgtgcagcttccagtccaaggcgacggtgtttggcgcctcgtggaacccagtgcacgcggcgggcgccaacgctgtacccgctgcggtgtaccaccaccatcaccaccacccctacgtgcacccccaggcgcccgtggcggcggcggcgccggacggcaggtacatgcgctcctggctggagcccacgcccggtgcgctctccttcgcgggcttgccctccagccggccttatggcattaaacctgaaccgctgtcggccagaaggggtgactgtcccacgcttgacactcacactttgtccctgactgactatgcttgtggttctcctccagttgatagagaaaaacaacccagcgaaggcgccttctctgaaaacaatgctgagaatgagagcggcggagacaagccccccatcgatcccaataacccagcagccaactggcttcatgcgcgctccactcggaaaaagcggtgcccctatacaaaacaccagaccctggaactggagaaagagtttctgttcaacatgtacctcaccagggaccgcaggtacgaggtggctcgactgctcaacctcaccgagaggcaggtcaagatctggttccagaaccgcaggatgaaaatgaagaaaatcaacaaagaccgagcaaaagacgagtgatgccatttgggcttatttagaaaaaagggtaagctagagagaaaaagaaagaactgtccgtcccccttccgccttctcccttctctcacccccaccctagcctccaccatccccgcacaaagcggctctaaacctcaggccacatcttttccaaggcaaaccctgttcaggctggctcgtaggcctgccgctttgatggaggaggtattgtaagctttccattttctataagaaaaaggaaaagttgaggggggggcattagtgctgatagctgtgtgtgttagcttgtatatatatttttaaaaatctacctgttcctgacttaaaacaaaaggaaagaaactacctttttataatgcacaactgttgatggtaggctgtatagtttttagtctgtgtagttaatttaatttgcagtttgtgcggcagattgctctgccaagatacttgaacactgtgttttattgtggtaattatgttttgtgattcaaacttctgtgtactgggtgatgcacccattgtgattgtggaagatagaattcaatttgaactcaggttgtttatgaggggaaaaaaacagttgcatagagtatagctctgtagtggaatatgtcttctgtataactaggctgttaacctatgattgtaaagtagctgtaagaatttcccagtgaaataaaaaaaaattttaagtgttctcggggatgcatagattcatcattttctccaccttaaaaatgcgggcatttaagtctgtccattatctatatagtcctgtcttgtctattgtatatataatctatatgattaaagaaaatatgcataatcagacaagcttgaatattgtttttgcaccagacgaacagtgaggaaattcggagctatacatatgtgcagaaggttactacctagggtttatgcttaattttaattggaggaaatgaatgctgattgtaacggagttaattttattgataataaattatacactatgaaaccgccattgggctactgtagatttgtatccttgatgaatctggggtttccatcagactgaacttacactgtatattttgcaatagttacctcaaggcctactgaccaaattgttgtgttgagatgatatttaactttttgccaaataaaatatattgattcttttctaaaaaaaaaaaaaaaaaaaa

SEQ ID NO: 168 - DNA, 573 bp, Homo sapiens
atgaagtccagcggcctcttccccttcctggtgctgcttgccctgggaactctggcaccttgggctgtggaaggctctggaaagtccttcaaagctggagtctgtcctcctaagaaatctgcccagtgccttagatacaagaaacctgagtgccagagtgactggcagtgtccagggaagaagagatgttgtcctgacacttgtggcatcaaatgcctggatcctgttgacaccccaaacccaacaaggaggaagcctgggaagtgcccagtgacttatggccaatgtttgatgcttaacccccccaatttctgtgagatggatggccagtgcaagcgtgacttgaagtgttgcatgggcatgtgtgggaaatcctgcgtttcccctgtgaaagcttgattcctgccatatggaggaggctctggagtcctgctctgtgtggtccaggtcctttccaccctgagacttggctccaccactgatatcctcctttggggaaaggcaagcacacagcaggctttcaagaagtgccagttgatcgaatgtaataaataaacgagcctatttctcttt

SEQ ID NO: 169 - DNA, 4171 bp, Homo sapiens
ctggagccgctgagcccccgctgcggccgggagctgcatgggggagcgccggcagcgcttgggaagatgccccggccggagctgcccctgccggagggctgggaggaggcgcgcgacttcgacggcaaggtctactacatagaccacacgaaccgcaccaccagctggatcgacccgcgggacaggtacaccaaaccgctcacctttgctgactgcattagtgatgagttgccgctaggatgggaagaggcatatgacccacaggttggagattacttcatagaccacaacaccaaaaccactcagattgaggatcctcgagtacaatggcggcgggagcaggaacatatgctgaaggattacctggtggtggcccaggaggctctgagtgcacaaaaggagatctaccaggtgaagcagcagcgcctggagcttgcacagcaggagtaccagcaactgcatgccgtctgggagcataagctgggctcccaggtcagcttggtctctggttcatcatccagctccaagtatgaccctgagatcctgaaagctgaaattgccactgcaaaatcccgggtcaacaagctgaagagagagatggttcacctccagcacgagctgcagttcaaagagcgtggctttcagaccctgaagaaaatcgataagaaaatgtctgatgctcagggcagctacaaactggatgaagctcaggctgtcttgagagaaacaaaagccatcaaaaaggctattacctgtggggaaaaggaaaagcaagatctcattaagagccttgccatgttgaaggacggcttccgcactgacagggggtctcactcagacctgtggtccagcagcagctctctggagagttcgagtttcccgctaccgaaacagtacctggatgtgagctcccagacagacatctcgggaagcttcggcatcaacagcaacaatcagttggcagagaaggtcagattgcgccttcgatatgaagaggctaagagaaggatcgccaacctgaagatccagctggccaagcttgacagtgaggcctggcctggggtgctggactcagagagggaccggctgatccttatcaacgagaaggaggagctgctgaaggagatgcgcttcatcagcccccgcaagtggacccagggggaggtggagcagctggagatggcccggaagcggctggaaaaggacctgcaggcagcccgggacacccagagcaaggcgctgacggagaggttaaagttaaacagtaagaggaaccagcttgtgagagaactggaggaagccacccggcaggtggcaactctgcactcccagctgaaaagtctctcaagcagcatgcagtccctgtcctcaggcagcagccccggatccctcacgtccagccggggctccctggttgcatccagcctggactcctccacttcagccagcttcactgacctctactatgacccctttgagcagctggactcagagctgcagagcaaggtggagttcctgctcctggagggggccaccggcttccggccctcaggctgcatcaccaccatccacgaggatgaggtggccaagacccagaaggcagagggaggtggccgcctgcaggctctgcgttccctgtctggcaccccaaagtccatgacctccctatccccacgttcctctctctcctccccctccccaccctgttcccctctcatggctgaccccctcctggctggtgatgccttcctcaactccttggagtttgaagacccggagctgagtgccactctttgtgaactgagccttggtaacagcgcccaggaaagataccggctggaggaaccaggaacggagggcaagcagctgggccaagctgtgaatacggcccaggggtgtggcctgaaagtggcctgtgtctcagccgccgtatcggacgagtcagtggctggagacagtggtgtgtacgaggcttccgtgcagagactgggtgcttcagaagctgctgcatttgacagtgacgaatcggaagcagtgggtgcgacccgaattcagattgccctgaagtatgatgagaagaataagcaatttgcaatattaatcatccagctgagtaacctttctgctctgttgcagcaacaagaccagaaagtgaatatccgcgtggctgtccttccttgctctgaaagcacaacctgcctgttccggacccggcctctggacgcctcagacactctagtgttcaatgaggtgttctgggtatccatgtcctatccagcccttcaccagaagaccttaagagtcgatgtctgtaccaccgacaggagccatctggaagagtgcctgggaggcgcccagatcagcctggcggaggtctgccggtctggggagaggtcgactcgctggtacaaccttctcagctacaaatacttgaagaagcagagcagggagctcaagccagtgggagttatggcccctgcctcagggcctgccagcacggacgctgtgtctgctctgttggaacagacagcagtggagctggagaagaggcaggagggcaggagcagcacacagacactggaagacagctggaggtatgaggagaccagtgagaatgaggcagtagccgaggaagaggaggaggaggtggaggaggaggagggagaagaggatgttttcaccgagaaagcctcacctgatatggatgggtacccagcattaaaggtggacaaagagaccaacacggagaccccggccccatcccccacagtggtgcgacctaaggaccggagagtgggcaccccgtcccaggggccatttcttcgagggagcaccatcatccgctctaagaccttctccccaggaccccagagccagtacgtgtgccggctgaatcggagtgatagtgacagctccactctgtccaaaaagccaccttttgttcgaaactccctggagcgacgcagcgtccggatgaagcggccttcctcggtcaagtcgctgcgctccgagcgtctgatccgtacctcgctggacctggagttagacctgcaggcgacaagaacctggcacagccaactgacccaggagatctcggtgctgaaggagctcaaggagcagctggaacaagccaagagccacggggagaaggagctgccacagtggttgcgtgaggacgagcgtttccgcctgctgctgaggatgctggagaagcggcagatggaccgagcggagcacaagggtgagcttcagacagacaagatgatgagggcagctgccaaggatgtgcacaggctccgaggccagagctgtaaggaacccccagaagttcagtctttcagggagaagatggcatttttcacccggcctcggatgaatatcccagctctctctgcagatgacgtctaatcgccagaaaagtatttcctttgttccactgaccaggctgtgaacattgactgtggctaaagttatttatgtggtgttatatgaaggtactgagtcacaagtcctctagtgctcttgttggtttgaagatgaaccgactttttagtttgggtcctactgttgttattaaaaacagaacaaaaacaaaacacacacacacacaaaaacagaaacaaaaaaaaccagcattaaaataataagattgtatagtttgtatatttaggagtgtatttttgggaaagaaaatttaaatgaactaaagcagtattgagttgctgctcttcttaaaatcgtttagattttttttggtttgtacagctccaccttttagaggtcttactgcaataagaagtaatgcctgggggacggtaatcctaataggacgtcccgcacttgtcacagtacagctaatttttcctagttaacatattttgtacaatattaaaaaaatgcacagaaaccattgggggggattcagaggtgcatccacggatcttcttgagctgtgacgtgtttttatgtggctgcccaacgtggagcgggcagtgtgataggctgggtgggctaagcagcctagtctatgtgggtgacaggccacgctggtctcagatgcccagtgaagccactaacatgagtgaggggagggctgtggggaactccattcagttttatctccatcaataaagtggcctttcaaaaagaaaaaaaaaaaaaaaaaaaaaaa

SEQ ID NO: 170 - DNA, 3084 bp, Homo sapiens
aatcggttgagagctgagctggacttggcggtgggagccggagcctgcttgttgcagctgtgggtgaggacggctctagctagttcccttttagactatggcgacatacctggagttcatccagcagaatgaagaacgggatggtgtgcgttttagttggaacgtgtggccttccagccggctggaggctacaagaatggttgtacccctggcttgtctccttactcctttgaaagaacgtccagacctacctcctgtacaatatgaacctgtgctttgcagcaggccaacttgtaaagctgttctcaacccactttgtcaggttgattatcgagcaaaactttgggcctgtaatttctgttttcaaagaaatcagtttcctccagcttatggaggcatatctgaggtgaatcaacctgccgaattgatgccccagttttctacaattgagtacgtgatacagcgaggtgctcagtcccctctgatctttctctatgtggttgacacatgcctggaggaagatgaccttcaagcactcaaagagtccctgcagatgtccctgagtcttcttcctccagatgctctggtgggtctgatcacatttggaaggatggtgcaggttcatgagctaagctgtgaaggaatctccaaaagttatgtcttccgagggaccaaggatttaactgcaaagcaaatacaggatatgttgggcctgaccaagccagccatgcccatgcagcaagcacgacctgcacaaccacaggagcacccttttgcttcaagcagatttctgcagcctgttcacaagattgatatgaacctcactgatcttcttggggagctacagagggacccatggccagtaactcaggggaagagacctttgcgatccactggtgtggctttgtccattgctgttggcttgctggagggcacttttccaaacacaggagccaggatcatgctgtttactggaggtccccctacccaagggcctggcatggtggttggagatgaattaaagattcctattcgttcttggcatgatattgagaaagataatgcacgattcatgaaaaaggcaaccaagcactatgagatgcttgctaatcgaacagctgcaaatggtcactgcattgatatttatgcttgtgcccttgatcaaactggacttttggagatgaagtgttgtgcaaatcttactggaggctacatggtaatgggagattctttcaacacttctctcttcaagcagacattccaaagaatctttactaaagattttaatggagatttccgaatggcatttggtgctactttggacgtaaagacctctcgggaactgaagattgcaggagccattggtccatgcgtatctctgaatgtgaaaggactgtgtgtgtcagaaaatgagcttggtgttggtggcacgagtcagtggaaaatctgtggcctagatcctacatctacacttggcatctattttgaagttgtcaatcagcacaacaccccgatcccccaaggaggcagaggagccatccagtttgtcacgcattatcagcactccagcacccagagacgcatccgcgtgaccaccatcgcccgaaattgggcagatgtacagagtcagctcaggcacatagaagcagcatttgaccaggaggctgcggcagtgttgatggcacggcttggggtgttccgagcggagtcagaggaggggcccgatgtgctccggtggctggaccgacaactcatccgactgtgtcaaaagtttggacagtataacaaagaagaccccacttcttttaggttatcagattccttttctctatatcctcagtttatgttccatctgagaagatctccatttcttcaagtgtttaacaacagtcctgatgagtcgtcatattacagacatcattttgcccggcaggacctgacccagtccctcatcatgatccagcccattctctactcttactcctttcatgggccaccagagccagtactcttggatagcagcagcattctagctgacagaattttgctgatggatactttctttcaaattgtcatttatcttggtgagaccatagcccagtggcgtaaagctggctaccaggacatgcccgagtatgaaaacttcaagcaccttctgcaggcaccactggatgatgctcaagaaattctgcaagcacgcttcccgatgccacgttacatcaacacggagcatggaggcagtcaggctcgattccttttgtccaaagtgaacccatctcagacacacaataacctgtatgcttggggacaggaaactggagcacccatcctaactgatgatgttagcctgcaggtgttcatggaccatttgaagaagctggctgtctccagtgcctgttaagctgaggatacaaccaggaaatgcaacggtgtcagattgtgttcaaaatgtctagaaaggcttgataacattcctgttacttttctagcagattttaacaaataatcaaggacattttatatgtaactctttagattataatttatttgtattcctgtctttgtcctttttcttgcactataaaattataaggtcataaatgttttggtacttgtagatgtttatgtgctttttgtatcctaacttttagaatctaaataaaatcagaggtaatgtattttggcagcttgtttaggtgagaatcttaatgatcataaaaggaaataaatctagatgcagaaagtactggctaaaatattgctaatacaaatgtgatttcctgaggtctctgtgtgagtgtgtatgtgttttaagtgacttccttaagaggtgtttcctgaacctaattctcataattaaagtaatgtatatgcaggatcaaaatgaaacaaatataccttatcctaaagagctcataacaaataagttacctccactctataaactcagacctactttttgaagataactgcttttaacctctccttacaagatttttgttgttgatgtatttaattttagcccatgtctcaattctcattttcaaagaatcaatatattaatatacaaaaaaaaaaaaaaaa

SEQ ID NO: 171 - DNA, 43816 bp, Homo sapiens
aagcgttgcacaattcccccaacctccatacatacggcagctcttctagacacaggttttcccaggtcaaatgcggggaccccagccatatctcccaccctgagaaattttggagtttcagggagctcagaagctctgcagaggccaccctctctgaggggattcttcttagacctccatccagaggcaaatgttgacctgtccatgctgaaaccctcaggccttcctgggtcatcttctcccacccgctccttgatgacagggagcaggagcactaaagccacaccagaaatggattcaggactgacaggagccaccttgtcacctaagacatctacaggtgcaatcgtggtgacagaacatactctgccctttacttccccagataagaccttggccagtcctacatcttcggttgtgggaagaaccacccagtctttgggggtgatgtcctctgctctccctgagtcaacctctagaggaatgacacactccgagcaaagaaccagcccatcgctgagtccccaggtcaatggaactccctctaggaactaccctgctacaagcatggtttcaggattgagttccccaaggaccaggaccagttccacagaaggaaattttaccaaagaagcatctacatacacactcactgtagagaccacaagtggcccagtcactgagaagtacacagtccccactgagacctcaacaactgaaggtgacagcacagagaccccctgggacacaagatatattcctgtaaaaatcacatctccaatgaaaacatttgcagattcaactgcatccaaggaaaatgccccagtgtctatgactccagctgagaccacagttactgactcacatactccaggaaggacaaacccatcatttgggacactttattcttccttccttgacctatcacctaaagggaccccaaattccagaggtgaaacaagcctggaactgattctatcaaccactggatatcccttctcctctcctgaacctggctctgcaggacacagcagaataagtaccagtgcgcctttgtcatcatctgcttcagttctcgataataaaatatcagagaccagcatattctcaggccagagtctcacctcccctctgtctcctggggtgcccgaggccagagccagcacaatgcccaactcagctatccctttttccatgacactaagcaatgcagaaacaagtgccgaaagggtcagaagcacaatttcctctctggggactccatcaatatccacaaagcagacagcagagactatccttaccttccatgccttcgctgagaccatggatatacccagcacccacatagccaagactttggcttcagaatggttgggaagtccaggtacccttggtggcaccagcacttcagcgctgacaaccacatctccatctaccactttagtctcagaggagaccaacacccatcactccacgagtggaaaggaaacagaaggaactttgaatacatctatgactccacttgagacctctgctcctggagaagagtccgaaatgactgccaccttggtccccactctaggttttacaactcttgacagcaagatcagaagtccatctcaggtctcttcatcccacccaacaagagagctcagaaccacaggcagcacctctgggaggcagagttccagcacagctgcccacgggagctctgacatcctgagggcaaccacttccagcacctcaaaagcatcatcatggaccagtgaaagcacagctcagcaatttagtgaaccccagcacacacagtgggtggagacaagtcctagcatgaaaacagagagacccccagcatcaaccagtgtggcagcccctatcaccacttctgttccctcagtggtctctggcttcaccaccctgaagaccagctccacaaaagggatttggcttgaagaaacatctgcagacacactcatcggagaatccacagctggcccaaccacccatcagtttgctgttcccactgggatttcaatgacaggaggcagcagcaccaggggaagccagggcacaacccacctactcaccagagccacagcatcatctgagacatccgcagatttgactctggccacgaacggtgtcccagtctccgtgtctccagcagtgagcaagacggctgctggctcaagtcctccaggagggacaaagccatcatatacaatggtttcttctgtcatccctgagacatcatctctacagtcctcagctttcagggaaggaaccagcctgggactgactccattaaacactagacatcccttctcttcccctgaaccagactctgcaggacacaccaagataagcaccagcattcctctgttgtcatctgcttcagttcttgaggataaagtgtcagcgaccagcacattctcacaccacaaagccacctcatctattaccacagggactcctgaaatctcaacaaagacaaagcccagctcagccgttctttcctccatgaccctaagcaatgcagcaacaagtcctgaaagagtcagaaatgcaacttcccctctgactcatccatctccatcaggggaagagacagcagggagtgtcctcactctcagcacctctgctgagactacagactcacctaacatccacccaactgggacactgacttcagaatcgtcagagagtcctagcactctcagcctcccaagtgtctctggagtcaaaaccacattttcttcatctactccttccactcatctatttactagtggagaagaaacagaggaaacttcgaatccatctgtgtctcaacctgagacttctgtttccagagtaaggaccaccttggccagcacctctgtccctaccccagtattccccaccatggacacctggcctacacgttcagctcagttctcttcatcccacctagtgagtgagctcagagctacgagcagtacctcagttacaaactcaactggttcagctcttcctaaaatatctcacctcactgggacggcaacaatgtcacagaccaatagagacacgtttaatgactctgctgcaccccaaagcacaacttggccagagactagtcccagattcaagacagggttaccttcagcaacaaccactgtttcaacctctgccacttctctctctgctactgtaatggtctctaaattcacttctccagcaactagttccatggaagcaacttctatcagggaaccatcaacaaccatcctcacaacagagaccacgaatggcccaggctctatggctgtggcttctaccaacatcccaattggaaagggctacattactgaaggaagattggacacaagccatctgcccattggaaccacagcttcctctgagacatctatggattttaccatggccaaagaaagtgtctcaatgtcagtatctccatctcagtccatggatgctgctggctcaagcactccaggaaggacaagccaattcgttgacacattttctgatgatgtctatcatttaacatccagagaaattacaatacctagagatggaacaagctcagctctgactccacaaatgactgcaactcaccctccatctcctgatcctggctctgctagaagcacctggcttggcatcttgtcctcatctccttcttctcctactcccaaagtcacaatgagctccacattttcaactcagagagtcaccacaagcatgataatggacacagttgaaactagtcggtggaacatgcccaacttaccttccacgacttccttgacaccaagtaatattccaacaagtggtgccataggaaaaagcaccctggttcccttggacactccatctccagccacatcattggaggcatcagaagggggacttccaaccctcagcacctaccctgaatcaacaaacacacccagcatccacctcggagcacacgctagttcagaaagtccaagcaccatcaaacttaccatggcttcagtagtaaaacctggctcttacacacctctcaccttcccctcaatagagacccacattcatgtatcaacagccagaatggcttactcttctgggtcttcacctgagatgacagctcctggagagactaacactggtagtacctgggaccccaccacctacatcaccactacggatcctaaggatacaagttcagctcaggtctctacaccccactcagtgaggacactcagaaccacagaaaaccatccaaagacagagtccgccaccccagctgcttactctggaagtcctaaaatctcaagttcacccaatctcaccagtccggccacaaaagcatggaccatcacagacacaactgaacactccactcaattacattacacaaaattggcagaaaaatcatctggatttgagacacagtcagctccaggacctgtctctgtagtaatccctacctcccctaccattggaagcagcacattggaactaacttctgatgtcccaggggaacccctggtccttgctcccagtgagcagaccacaatcactctccccatggcaacatggctgagtaccagtttgacagaggaaatggcttcaacagaccttgatatttcaagtccaagttcacccatgagtacatttgctatttttccacctatgtccacaccttctcatgaactttcaaagtcagaggcagataccagtgccattagaaatacagattcaacaacgttggatcagcacctaggaatcaggagtttgggcagaactggggacttaacaactgttcctatcaccccactgacaaccacgtggaccagtgtgattgaacactcaacacaagcacaggacaccctttctgcaacgatgagtcctactcacgtgacacagtcactcaaagatcaaacatctataccagcctcagcatccccttcccatcttactgaagtctaccctgagctcgggacacaagggagaagctcctctgaggcaaccactttttggaaaccatctacagacacactgtccagagagattgagactggcccaacaaacattcaatccactccacccatggacaacacaacaacagggagcagtagtagtggagtcaccctgggcatagcccaccttcccataggaacatcctccccagctgagacatccacaaacatggcactggaaagaagaagttctacagccactgtctctatggctgggacaatgggactccttgttactagtgctccaggaagaagcatcagccagtcattaggaagagtttcctctgtcctttctgagtcaactactgaaggagtcacagattctagtaagggaagcagcccaaggctgaacacacagggaaatacagctctctcctcctctcttgaacccagctatgctgaaggaagccagatgagcacaagcatccctctaacctcatctcctacaactcctgatgtggaattcatagggggcagcacattttggaccaaggaggtcaccacagttatgacctcagacatctccaagtcttcagcaaggacagagtccagctcagctacccttatgtccacagctttgggaagcactgaaaatacaggaaaagaaaaactcagaactgcctctatggatcttccatctccaactccatcaatggaggtgacaccatggatttctctcactctcagtaatgcccccaataccacagattcacttgacctcagccatggggtgcacaccagctctgcagggactttggccactgacaggtcattgaatactggtgtcactagagcctccagattggaaaacggctctgatacctcttctaagtccctgtctatgggaaacagcactcacacttccatgacttacacagagaagagtgaagtgtcttcttcaatccatccccgacctgagacctcagctcctggagcagagaccactttgacttccactcctggaaacagggccataagcttaacattgcctttttcatccattccagtggaagaagtcatttctacaggcataacctcaggaccagacatcaactcagcacccatgacacattctcccatcaccccaccaacaattgtatggaccagtacaggcacaattgaacagtccactcaaccactacatgcagtttcttcagaaaaagtttctgtgcagacacagtcaactccatatgtcaactctgtggcagtgtctgcttcccctacccatgagaattcagtctcttctggaagcagcacatcctctccatattcctcagcctcacttgaatccttggattccacaatcagtaggaggaatgcaatcacttcctggctatgggacctcactacatctctccccactacaacttggccaagtactagtttatctgaggcactgtcctcaggccattctggggtttcaaacccaagttcaactacgactgaatttccactcttttcagctgcatccacatctgctgctaagcaaagaaatccagaaacagagacccatggtccccagaatacagccgcgagtactttgaacactgatgcatcctcggtcacaggtctttctgagactcctgtgggggcaagtatcagctctgaagtccctcttccaatggccataacttctagatcagatgtttctggccttacatctgagagtactgctaacccgagtttaggcacagcctcttcagcagggaccaaattaactaggacaatatccctgcccacttcagagtctttggtttcctttagaatgaacaaggatccatggacagtgtcaatccctttggggtcccatccaactactaatacagaaacaagcatcccagtaaacagcgcaggtccacctggcttgtccacagtagcatcagatgtaattgacacaccttcagatggggctgagagtattcccactgtctccttttccccctcccctgatactgaagtgacaactatctcacatttcccagaaaagacaactcattcatttagaaccatttcatctctcactcatgagttgacttcaagagtgacacctattcctggggattggatgagttcagctatgtctacaaagcccacaggagccagtccctccattacactgggagagagaaggacaatcacctctgctgctccaaccacttcccccatagttctcactgctagtttcacagagaccagcacagtttcactggataatgaaactacagtaaaaacctcagatatccttgacgcacggaaaacaaatgagctcccctcagatagcagttcttcttctgatctgatcaacacctccatagcttcttcaactatggatgtcactaaaacagcctccatcagtcccactagcatctcaggaatgacagcaagttcctccccatctctcttctcttcagatagaccccaggttcccacatctacaacagagacaaatacagccacctctccatctgtttccagtaacacctattctcttgatgggggctccaatgtgggtggcactccatccactttaccaccctttacaatcacccaccctgtcgagacaagctcggccctattagcctggtctagaccagtaagaactttcagcaccatggtcagcactgacactgcctccggagaaaatcctacctctagcaattctgtggtgacttctgttccagcaccaggtacatggaccagtgtaggcagtactactgacttacctgccatgggctttctcaagacaagtcctgcaggagaggcacactcacttctagcatcaactattgaaccagccactgccttcactccccatctctcagcagcagtggtcactggatccagtgctacatcagaagccagtcttctcactacgagtgaaagcaaagccattcattcttcaccacagaccccaactacacccacctctggagcaaactgggaaacttcagctactcctgagagccttttggtagtcactgagacttcagacacaacacttacctcaaagattttggtcacagataccatcttgttttcaactgtgtccacgccaccttctaaatttccaagtacggggactctgtctggagcttccttccctactttactcccggacactccagccatccctctcactgccactgagccaacaagttcattagctacatcctttgattccaccccactggtgactatagcttcggatagtcttggcacagtcccagagactaccctgaccatgtcagagacctcaaatggtgatgcactggttcttaagacagtaagtaacccagataggagcatccctggaatcactatccaaggagtaacagaaagtccactccatccttcttccacttccccctctaagattgttgctccacggaatacaacctatgaaggttcgatcacagtggcactttctactttgcctgcgggaactactggttcccttgtattcagtcagagttctgaaaactcagagacaacggctttggtagactcatcagctgggcttgagagggcatctgtgatgccactaaccacaggaagccagggtatggctagctctggaggaatcagaagtgggtccactcactcaactggaaccaaaacattttcttctctccctctgaccatgaacccaggtgaggttacagccatgtctgaaatcaccacgaacagactgacagctactcaatcaacagcacccaaagggatacctgtgaagcccaccagtgctgagtcaggcctcctaacacctgtctctgcctcctcaagcccatcaaaggcctttgcctcactgactacagctcccccaacttgggggatcccacagtctaccttgacatttgagttttctgaggtcccaagtttggatactaagtccgcttctttaccaactcctggacagtccctgaacaccattccagactcagatgcaagcacagcatcttcctcactgtccaagtctccagaaaaaaacccaagggcaaggatgatgacttccacaaaggccataagtgcaagctcatttcaatcaacaggttttactgaaacccctgagggatctgcctccccttctatggcagggcatgaacccagagtccccacttcaggaacaggggaccctagatatgcctcagagagcatgtcttatccagacccaagcaaggcatcatcagctatgacatcgacctctcttgcatcaaaactcacaactctcttcagcacaggtcaagcagcaaggtctggttctagttcctctcccataagcctatccactgagaaagaaacaagcttcctttcccccactgcatccacctccagaaagacttcactatttcttgggccttccatggcaaggcagcccaacatattggtgcatcttcagacttcagctctgacactttctccaacatccactctaaatatgtcccaggaggagcctcctgagttaacctcaagccagaccattgcagaagaagagggaacaacagctgaaacacagacgttaaccttcacaccatctgagaccccaacatccttgttacctgtctcttctcccacagaacccacagccagaagaaagagttctccagaaacatgggcaagctctatttcagttcctgccaagacctccttggttgaaacaactgatggaacgctagtgaccaccataaagatgtcaagccaggcagcacaaggaaattccacgtggcctgccccagcagaggagacggggagcagtccagcaggcacatccccaggaagcccagaaatgtctaccactctcaaaatcatgagctccaaggaacccagcatcagcccagagatcaggtccactgtgagaaattctccttggaagactccagaaacaactgttcccatggagaccacagtggaaccagtcacccttcagtccacagccctaggaagtggcagcaccagcatctctcacctgcccacaggaaccacatcaccaaccaagtcaccaacagaaaatatgttggctacagaaagggtctccctctccccatccccacctgaggcttggaccaacctttattctggaactccaggagggaccaggcagtcactggccacaatgtcctctgtctccctagagtcaccaactgctagaagcatcacagggactggtcagcaaagcagtccagaactggtttcaaagacaactggaatggaattctctatgtggcatggctctactggagggaccacaggggacacacatgtctctctgagcacatcttccaatatccttgaagaccctgtaaccagcccaaactctgtgagctcattgacagataaatccaaacataaaaccgagacatgggtaagcaccacagccattccctccactgtcctgaataataagataatggcagctgaacaacagacaagtcgatctgtggatgaggcttattcatcaactagttcttggtcagatcagacatctgggagtgacatcacccttggtgcatctcctgatgtcacaaacacattatacatcacctccacagcacaaaccacctcactagtgtctctgccctctggagaccaaggcattacaagcctcaccaatccctcaggaggaaaaacaagctctgcgtcatctgtcacatctccttcaatagggcttgagactctgagggccaatgtaagtgcagtgaaaagtgacattgcccctactgctgggcatctatctcagacttcatctcctgcggaagtgagcatcctggacgtaaccacagctcctactccaggtatctccaccaccatcaccaccatgggaaccaactcaatctcaactaccacacccaacccagaagtgggtatgagtaccatggacagcaccccggccacagagaggcgcacaacttctacagaacacccttccacctggtcttccacagctgcatcagattcctggactgtcacagacatgacttcaaacttgaaagttgcaagatctcctggaacaatttccacaatgcatacaacttcattcttagcctcaagcactgaattagactccatgtctactccccatggccgtataactgtcattggaaccagcctggtcactccatcctctgatgcttcagctgtaaagacagagaccagtacaagtgaaagaacattgagtccttcagacacaactgcatctactcccatctcaactttttctcgtgtccagaggatgagcatctcagttcctgacattttaagtacaagttggactcccagtagtacagaagcagaagatgtgcctgtttcaatggtttctacagatcatgctagtacaaagactgacccaaatacgcccctgtccacttttctgtttgattctctgtccactcttgactgggacactgggagatctctgtcatcagccacagccactacctcagctcctcagggggccacaactccccaggaactcactttggaaaccatgatcagcccagctacctcacagttgcccttctctatagggcacattacaagtgcagtcacaccagctgcaatggcaaggagctctggagttactttttcaagaccagatcccacaagcaaaaaggcagagcagacttccactcagcttcccaccaccacttctgcacatccagggcaggtgcccagatcagcagcaacaactctggatgtgatcccacacacagcaaaaactccagatgcaacttttcagagacaagggcagacagctcttacaacagaggcaagagctacatctgactcctggaatgagaaagaaaaatcaaccccaagtgcaccttggatcactgagatgatgaattctgtctcagaagataccatcaaggaggttaccagctcctccagtgtattaaggaccctgaatacgctggacataaacttggaatctgggacgacttcatccccaagttggaaaagcagcccatatgagagaattgccccttctgagtccaccacagacaaagaggcaattcacccttctacaaacacagtagagaccacaggctgggtcacaagttccgaacatgcttctcattccactatcccagcccactcagcgtcatccaaactcacatctccagtggttacaacctccaccagggaacaagcaatagtttctatgtcaacaaccacatggccagagtctacaagggctagaacagagcctaattccttcttgactattgaactgagggacgtcagcccttacatggacaccagctcaaccacacaaacaagtattatctcttccccaggttccactgcgatcaccaaggggcctagaacagaaattacctcctctaagagaatatccagctcattccttgcccagtctatgaggtcgtcagacagcccctcagaagccatcaccaggctgtctaactttcctgccatgacagaatctggaggaatgatccttgctatgcaaacaagtccacctggcgctacatcactaagtgcacctactttggatacatcagccacagcctcctggacagggactccactggctacgactcagagatttacatactcagagaagaccactctctttagcaaaggtcctgaggatacatcacagccaagccctccctctgtggaagaaaccagctcttcctcttccctggtacctatccatgctacaacctcgccttccaatattttgttgacatcacaagggcacagtccctcctctactccacctgtgacctcagttttcttgtctgagacctctggcctggggaagaccacagacatgtcgaggataagcttggaacctggcacaagtttacctcccaatttgagcagtacagcaggtgaggcgttatccacttatgaagcctccagagatacaaaggcaattcatcattctgcagacacagcagtgacgaatatggaggcaaccagttctgaatattctcctatcccaggccatacaaagccatccaaagccacatctccattggttacctcccacatcatgggggacatcacttcttccacatcagtatttggctcctccgagaccacagagattgagacagtgtcctctgtgaaccagggacttcaggagagaagcacatcccaggtggccagctctgctacagagacaagcactgtcattacccatgtgtctagtggtgatgctactactcatgtcaccaagacacaagccactttctctagcggaacatccatctcaagccctcatcagtttataacttctaccaacacatttacagatgtgagcaccaacccctccacctctctgataatgacagaatcttcaggagtgaccatcaccacccaaacaggtcctactggagctgcaacacagggtccatatctcttggacacatcaaccatgccttacttgacagagactccattagctgtgactccagattttatgcaatcagagaagaccactctcataagcaaaggtcccaaggatgtgtcctggacaagccctccctctgtggcagaaaccagctatccctcttccctgacacctttcttggtcacaaccatacctcctgccacttccacgttacaagggcaacatacatcctctcctgtttctgcgacttcagttcttacctctggactggtgaagaccacagatatgttgaacacaagcatggaacctgtgaccaattcacctcaaaatttgaacaatccatcaaatgagatactggccactttggcagccaccacagatatagagactattcatccttccataaacaaagcagtgaccaatatggggactgccagttcagcacatgtactgcattccactctcccagtcagctcagaaccatctacagccacatctccaatggttcctgcctccagcatgggggacgctcttgcttctatatcaatacctggttctgagaccacagacattgagggagagccaacatcctccctgactgctggacgaaaagagaacagcaccctccaggagatgaactcaactacagagtcaaacatcatcctctccaatgtgtctgtgggggctattactgaagccacaaaaatggaagtcccctcttttgatgcaacattcataccaactcctgctcagtcaacaaagttcccagatattttctcagtagccagcagtagactttcaaactctcctcccatgacaatatctacccacatgaccaccacccagacagggtcttctggagctacatcaaagattccacttgccttagacacatcaaccttggaaacctcagcagggactccatcagtggtgactgaggggtttgcccactcaaaaataaccactgcaatgaacaatgatgtcaaggacgtgtcacagacaaaccctccctttcaggatgaagccagctctccctcttctcaagcacctgtccttgtcacaaccttaccttcttctgttgctttcacaccgcaatggcacagtacctcctctcctgtttctatgtcctcagttcttacttcttcactggtaaagaccgcaggcaaggtggatacaagcttagaaacagtgaccagttcacctcaaagtatgagcaacactttggatgacatatcggtcacttcagcagccaccacagatatagagacaacgcatccttccataaacacagtagttaccaatgtggggaccaccggttcagcatttgaatcacattctactgtctcagcttacccagagccatctaaagtcacatctccaaatgttaccacctccaccatggaagacaccacaatttccagatcaatacctaaatcctctaagactacaagaactgagactgagacaacttcctccctgactcctaaactgagggagaccagcatctcccaggagatcacctcgtccacagagacaagcactgttccttacaaagagctcactggtgccactaccgaggtatccaggacagatgtcacttcctctagcagtacatccttccctggccctgatcagtccacagtgtcactagacatctccacagaaaccaacaccaggctgtctacctccccaataatgacagaatctgcagaaataaccatcaccacccaaacaggtcctcatggggctacatcacaggatacttttaccatggacccatcaaatacaaccccccaggcagggatccactcagctatgactcatggattttcacaattggatgtgaccactcttatgagcagaattccacaggatgtatcatggacaagtcctccctctgtggataaaaccagctccccctcttcctttctgtcctcacctgcaatgaccacaccttccctgatttcttctaccttaccagaggataagctctcctctcctatgacttcacttctcacctctggcctagtgaagattacagacatattacgtacacgcttggaacctgtgaccagctcacttccaaatttcagcagcacctcagataagatactggccacttctaaagacagtaaagacacaaaggaaatttttccttctataaacacagaagagaccaatgtgaaagccaacaactctggacatgaatcccattcccctgcactggctgactcagagacacccaaagccacaactcaaatggttatcaccaccactgtgggagatccagctccttccacatcaatgccagtgcatggttcctctgagactacaaacattaagagagagccaacatatttcttgactcctagactgagagagaccagtacctctcaggagtccagctttcccacggacacaagttttctactttccaaagtccccactggtactattactgaggtctccagtacaggggtcaactcttctagcaaaatttccaccccagaccatgataagtccacagtgccacctgacaccttcacaggagagatccccagggtcttcacctcctctattaagacaaaatctgcagaaatgacgatcaccacccaagcaagtcctcctgagtctgcatcgcacagtacccttcccttggacacatcaaccacactttcccagggagggactcattcaactgtgactcagggattcccatactcagaggtgaccactctcatgggcatgggtcctgggaatgtgtcatggatgacaactccccctgtggaagaaaccagctctgtgtcttccctgatgtcttcacctgccatgacatccccttctcctgtttcctccacatcaccacagagcatcccctcctctcctcttcctgtgactgcacttcctacttctgttctggtgacaaccacagatgtgttgggcacaacaagcccagagtctgtaaccagttcacctccaaatttgagcagcatcactcatgagagaccggccacttacaaagacactgcacacacagaagccgccatgcatcattccacaaacaccgcagtgaccaatgtagggacttccgggtctggacataaatcacaatcctctgtcctagctgactcagagacatcgaaagccacacctctgatgagtaccacctccaccctgggggacacaagtgtttccacatcaactcctaatatctctcagactaaccaaattcaaacagagccaacagcatccctgagccctagactgagggagagcagcacgtctgagaagaccagctcaacaacagagacaaatactgccttttcttatgtgcccacaggtgctattactcaggcctccagaacagaaatctcctctagcagaacatccatctcagaccttgatcggcccacaatagcacccgacatctccacaggaatgatcaccaggctcttcacctcccccatcatgacaaaatctgcagaaatgaccgtcaccactcaaacaactactcctggggctacatcacagggtatccttccctgggacacatcaaccacacttttccagggagggactcattcaaccgtgtctcagggattcccacactcagagataaccactcttcggagcagaacccctggagatgtgtcatggatgacaactccccctgtggaagaaaccagctctgggttttccctgatgtcaccttccatgacatccccttctcctgtttcctccacatcaccagagagcatcccctcctctcctctccctgtgactgcacttcttacttctgttctggtgacaaccacaaatgtattgggcacaacaagcccagagcccgtaacgagttcacctccaaatttaagcagccccacacaggagagactgaccacttacaaagacactgcgcacacagaagccatgcatgcttccatgcatacaaacactgcagtggccaacgtggggacctccatttctggacatgaatcacaatcttctgtcccagctgattcacacacatccaaagccacatctccaatgggtatcaccttcgccatgggggatacaagtgtttctacatcaactcctgccttctttgagactagaattcagactgaatcaacatcctctttgattcctggattaagggacaccaggacgtctgaggagatcaacactgtgacagagaccagcactgtcctttcagaagtgcccactactactactactgaggtctccaggacagaagttatcacttccagcagaacaaccatctcagggcctgatcattccaaaatgtcaccctacatctccacagaaaccatcaccaggctctccacttttccttttgtaacaggatccacagaaatggccatcaccaaccaaacaggtcctatagggactatctcacaggctacccttaccctggacacatcaagcacagcttcctgggaagggactcactcacctgtgactcagagatttccacactcagaggagaccactactatgagcagaagtactaagggcgtgtcatggcaaagccctccctctgtggaagaaaccagttctccttcttccccagtgcctttacctgcaataacctcacattcatctctttattccgcagtatcaggaagtagccccacttctgctctccctgtgacttcccttctcacctctggcaggaggaagaccatagacatgttggacacacactcagaacttgtgaccagctccttaccaagtgcaagtagcttctcaggtgagatactcacttctgaagcctccacaaatacagagacaattcacttttcagagaacacagcagaaaccaatatggggaccaccaattctatgcataaactacattcctctgtctcaatccactcccagccatccggacacacacctccaaaggttactggatctatgatggaggacgctattgtttccacatcaacacctggttctcctgagactaaaaatgttgacagagactcaacatcccctctgactcctgaactgaaagaggacagcaccgccctggtgatgaactcaactacagagtcaaacactgttttctccagtgtgtccctggatgctgctactgaggtctccagggcagaagtcacctactatgatcctacattcatgccagcttctgctcagtcaacaaagtccccagacatttcacctgaagccagcagcagtcattctaactctcctcccttgacaatatctacacacaagaccatcgccacacaaacaggtccttctggggtgacatctcttggccaactgaccctggacacatcaaccatagccacctcagcaggaactccatcagccagaactcaggattttgtagattcagaaacaaccagtgtcatgaacaatgatctcaatgatgtgttgaagacaagccctttctctgcagaagaagccaactctctctcttctcaggcacctctccttgtgacaacctcaccttctcctgtaacttccacattgcaagagcacagtacctcctctcttgtttctgtgacctcagtacccacccctacactggcgaagatcacagacatggacacaaacttagaacctgtgactcgttcacctcaaaatttaaggaacaccttggccacttcagaagccaccacagatacacacacaatgcatccttctataaacacagcagtggccaatgtggggaccaccagttcaccaaatgaattctattttactgtctcacctgactcagacccatataaagccacatccgcagtagttatcacttccacctcgggggactcaatagtttccacatcaatgcctagatcctctgcgatgaaaaagattgagtctgagacaactttctccctgatatttagactgagggagactagcacctcccagaaaattggctcatcctcagacacaagcacggtctttgacaaagcattcactgctgctactactgaggtctccagaacagaactcacctcctctagcagaacatccatccaaggcactgaaaagcccacaatgtcaccggacacctccacaagatctgtcaccatgctttctacttttgctggcctgacaaaatccgaagaaaggaccattgccacccaaacaggtcctcatagggcgacatcacagggtacccttacctgggacacatcaatcacaacctcacaggcagggacccactcagctatgactcatggattttcacaattagatttgtccactcttacgagtagagttcctgagtacatatcagggacaagcccaccctctgtggaaaaaaccagctcttcctcttcccttctgtctttaccagcaataacctcaccgtcccctgtacctactacattaccagaaagtaggccgtcttctcctgttcatctgacttcactccccacctctggcctagtgaagaccacagatatgctggcatctgtggccagtttacctccaaacttgggcagcacctcacataagataccgactacttcagaagacattaaagatacagagaaaatgtatccttccacaaacatagcagtaaccaatgtggggaccaccacttctgaaaaggaatcttattcgtctgtcccagcctactcagaaccacccaaagtcacctctccaatggttacctctttcaacataagggacaccattgtttccacatccatgcctggctcctctgagattacaaggattgagatggagtcaacattctccctggctcatgggctgaagggaaccagcacctcccaggaccccatcgtatccacagagaaaagtgctgtccttcacaagttgaccactggtgctactgagacctctaggacagaagttgcctcttctagaagaacatccattccaggccctgatcattccacagagtcaccagacatctccactgaagtgatccccagcctgcctatctcccttggcattacagaatcttcaaatatgaccatcatcactcgaacaggtcctcctcttggctctacatcacagggcacatttaccttggacacaccaactacatcctccagggcaggaacacactcgatggcgactcaggaatttccacactcagaaatgaccactgtcatgaacaaggaccctgagattctatcatggacaatccctccttctatagagaaaaccagcttctcctcttccctgatgccttcaccagccatgacttcacctcctgtttcctcaacattaccaaagaccattcacaccactccttctcctatgacctcactgctcacccctagcctagtgatgaccacagacacattgggcacaagcccagaacctacaaccagttcacctccaaatttgagcagtacctcacatgagatactgacaacagatgaagacaccacagctatagaagccatgcatccttccacaagcacagcagcgactaatgtggaaaccaccagttctggacatgggtcacaatcctctgtcctagctgactcagaaaaaaccaaggccacagctccaatggataccacctccaccatggggcatacaactgtttccacatcaatgtctgtttcctctgagactacaaaaattaagagagagtcaacatattccttgactcctggactgagagagaccagcatttcccaaaatgccagcttttccactgacacaagtattgttctttcagaagtccccactggtactactgctgaggtctccaggacagaagtcacctcctctggtagaacatccatccctggcccttctcagtccacagttttgccagaaatatccacaagaacaatgacaaggctctttgcctcgcccaccatgacagaatcagcagaaatgaccatccccactcaaacaggtccttctgggtctacctcacaggatacccttaccttggacacatccaccacaaagtcccaggcaaagactcattcaactttgactcagagatttccacactcagagatgaccactctcatgagcagaggtcctggagatatgtcatggcaaagctctccctctctggaaaatcccagctctctcccttccctgctgtctttacctgccacaacctcacctcctcccatttcctccacattaccagtgactatctcctcctctcctcttcctgtgacttcacttctcacctctagcccggtaacgaccacagacatgttacacacaagcccagaacttgtaaccagttcacctccaaagctgagccacacttcagatgagagactgaccactggcaaggacaccacaaatacagaagctgtgcatccttccacaaacacagcagcgtccaatgtggagattcccagctctggacatgaatccccttcctctgccttagctgactcagagacatccaaagccacatcaccaatgtttattacctccacccaggaggatacaactgttgccatatcaacccctcacttcttggagactagcagaattcagaaagagtcaatttcctccctgagccctaaattgagggagacaggcagttctgtggagacaagctcagccatagagacaagtgctgtcctttctgaagtgtccattggtgctactactgagatctccaggacagaagtcacctcctctagcagaacatccatctctggttctgctgagtccacaatgttgccagaaatatccaccacaagaaaaatcattaagttccctacttcccccatcctggcagaatcatcagaaatgaccatcaagacccaaacaagtcctcctgggtctacatcagagagtacctttacattagacacatcaaccactccctccttggtaataacccattcgactatgactcagagattgccacactcagagataaccactcttgtgagtagaggtgctggggatgtgccacggcccagctctctccctgtggaagaaacaagccctccatcttcccagctgtctttatctgccatgatctcaccttctcctgtttcttccacattaccagcaagtagccactcctcttctgcttctgtgacttcacttctcacaccaggccaagtgaagactactgaggtgttggacgcaagtgcagaacctgaaaccagttcacctccaagtttgagcagcacctcagttgaaatactggccacctctgaagtcaccacagatacggagaaaattcatcctttctcaaacacggcagtaaccaaagttggaacttccagttctggacatgaatccccttcctctgtcctacctgactcagagacaaccaaagccacatcggcaatgggtaccatctccattatgggggatacaagtgtttctacattaactcctgccttatctaacactaggaaaattcagtcagagccagcttcctcactgaccaccagattgagggagaccagcacctctgaagagaccagcttagccacagaagcaaacactgttctttctaaagtgtccactggtgctactactgaggtctccaggacagaagccatctcctttagcagaacatccatgtcaggccctgagcagtccacaatgtcacaagacatctccataggaaccatccccaggatttctgcctcctctgtcctgacagaatctgcaaaaatgaccatcacaacccaaacaggtccttcggagtctacactagaaagtacccttaatttgaacacagcaaccacaccctcttgggtggaaacccactctatagtaattcagggatttccacacccagagatgaccacttccatgggcagaggtcctggaggtgtgtcatggcctagccctccctttgtgaaagaaaccagccctccatcctccccgctgtctttacctgccgtgacctcacctcatcctgtttccaccacattcctagcacatatccccccctctccccttcctgtgacttcacttctcacctctggcccggcgacaaccacagatatcttgggtacaagcacagaacctggaaccagttcatcttcaagtttgagcaccacctcccatgagagactgaccacttacaaagacactgcacatacagaagccgtgcatccttccacaaacacaggagggaccaatgtggcaaccaccagctctggatataaatcacagtcctctgtcctagctgactcatctccaatgtgtaccacctccaccatgggggatacaagtgttctcacatcaactcctgccttccttgagactaggaggattcagacagagctagcttcctccctgacccctggattgagggagtccagcggctctgaagggaccagctcaggcaccaagatgagcactgtcctctctaaagtgcccactggtgctactactgagatctccaaggaagacgtcacctccatcccaggtcccgctcaatccacaatatcaccagacatctccacaagaaccgtcagctggttctctacatcccctgtcatgacagaatcagcagaaataaccatgaacacccatacaagtcctttaggggccacaacacaaggcaccagtactttggacacgtcaagcacaacctctttgacaatgacacactcaactatatctcaaggattttcacactcacagatgagcactcttatgaggaggggtcctgaggatgtatcatggatgagccctccccttctggaaaaaactagaccttccttttctctgatgtcttcaccagccacaacttcaccttctcctgtttcctccacattaccagagagcatctcttcctctcctcttcctgtgacttcactcctcacgtctggcttggcaaaaactacagatatgttgcacaaaagctcagaacctgtaaccaactcacctgcaaatttgagcagcacctcagttgaaatactggccacctctgaagtcaccacagatacagagaaaactcatccttcttcaaacagaacagtgaccgatgtggggacctccagttctggacatgaatccacttcctttgtcctagctgactcacagacatccaaagtcacatctccaatggttattacctccaccatggaggatacgagtgtctccacatcaactcctggcttttttgagactagcagaattcagacagaaccaacatcctccctgacccttggactgagaaagaccagcagctctgaggggaccagcttagccacagagatgagcactgtcctttctggagtgcccactggtgccactgctgaagtctccaggacagaagtcacctcctctagcagaacatccatctcaggctttgctcagctcacagtgtcaccagagacttccacagaaaccatcaccagactccctacctccagcataatgacagaatcagcagaaatgatgatcaagacacaaacagatcctcctgggtctacaccagagagtactcatactgtggacatatcaacaacacccaactgggtagaaacccactcgactgtgactcagagattttcacactcagagatgaccactcttgtgagcagaagccctggtgatatgttatggcctagtcaatcctctgtggaagaaaccagctctgcctcttccctgctgtctctgcctgccacgacctcaccttctcctgtttcctctacattagtagaggatttcccttccgcttctcttcctgtgacttctcttctcaaccctggcctggtgataaccacagacaggatgggcataagcagagaacctggaaccagttccacttcaaatttgagcagcacctcccatgagagactgaccactttggaagacactgtagatacagaagacatgcagccttccacacacacagcagtgaccaacgtgaggacctccatttctggacatgaatcacaatcttctgtcctatctgactcagagacacccaaagccacatctccaatgggtaccacctacaccatgggggaaacgagtgtttccatatccacttctgacttctttgagaccagcagaattcagatagaaccaacatcctccctgacttctggattgagggagaccagcagctctgagaggatcagctcagccacagagggaagcactgtcctttctgaagtgcccagtggtgctaccactgaggtctccaggacagaagtgatatcctctaggggaacatccatgtcagggcctgatcagttcaccatatcaccagacatctctactgaagcgatcaccaggctttctacttcccccattatgacagaatcagcagaaagtgccatcactattgagacaggttctcctggggctacatcagagggtaccctcaccttggacacctcaacaacaaccttttggtcagggacccactcaactgcatctccaggattttcacactcagagatgaccactcttatgagtagaactcctggagatgtgccatggccgagccttccctctgtggaagaagccagctctgtctcttcctcactgtcttcacctgccatgacctcaacttcttttttctccacattaccagagagcatctcctcctctcctcatcctgtgactgcacttctcacccttggcccagtgaagaccacagacatgttgcgcacaagctcagaacctgaaaccagttcacctccaaatttgagcagcacctcagctgaaatattagccacgtctgaagtcaccaaagatagagagaaaattcatccctcctcaaacacacctgtagtcaatgtagggactgtgatttataaacatctatccccttcctctgttttggctgacttagtgacaacaaaacccacatctccaatggctaccacctccactctggggaatacaagtgtttccacatcaactcctgccttcccagaaactatgatgacacagccaacttcctccctgacttctggattaagggagatcagtacctctcaagagaccagctcagcaacagagagaagtgcttctctttctggaatgcccactggtgctactactaaggtctccagaacagaagccctctccttaggcagaacatccaccccaggtcctgctcaatccacaatatcaccagaaatctccacggaaaccatcactagaatttctactcccctcaccacgacaggatcagcagaaatgaccatcacccccaaaacaggtcattctggggcatcctcacaaggtacctttaccttggacacatcaagcagagcctcctggccaggaactcactcagctgcaactcacagatctccacactcagggatgaccactcctatgagcagaggtcctgaggatgtgtcatggccaagccgcccatcagtggaaaaaactagccctccatcttccctggtgtctttatctgcagtaacctcaccttcgccactttattccacaccatctgagagtagccactcatctcctctccgggtgacttctcttttcacccctgtcatgatgaagaccacagacatgttggacacaagcttggaacctgtgaccacttcacctcccagtatgaatatcacctcagatgagagtctggccacttctaaagccaccatggagacagaggcaattcagctttcagaaaacacagctgtgactcagatgggcaccatcagcgctagacaagaattctattcctcttatccaggcctcccagagccatccaaagtgacatctccagtggtcacctcttccaccataaaagacattgtttctacaaccatacctgcttcctctgagataacaagaattgagatggagtcaacatccaccctgacccccacaccaagggagaccagcacctcccaggagatccactcagccacaaagccaagcactgttccttacaaggcactcactagtgccacgattgaggactccatgacacaagtcatgtcctctagcagaggacctagccctgatcagtccacaatgtcacaagacatatccactgaagtgatcaccaggctctctacctcccccatcaagacagaatctacagaaatgaccattaccacccaaacaggttctcctggggctacatcaaggggtacccttaccttggacacttcaacaacttttatgtcagggacccactcaactgcatctcaaggattttcacactcacagatgaccgctcttatgagtagaactcctggagatgtgccatggctaagccatccctctgtggaagaagccagctctgcctctttctcactgtcttcacctgtcatgacctcatcttctcccgtttcttccacattaccagacagcatccactcttcttcgcttcctgtgacatcacttctcacctcagggctggtgaagaccacagagctgttgggcacaagctcagaacctgaaaccagttcacccccaaatttgagcagcacctcagctgaaatactggccatcactgaagtcactacagatacagagaaactggagatgaccaatgtggtaacctcaggttatacacatgaatctccttcctctgtcctagctgactcagtgacaacaaaggccacatcttcaatgggtatcacctaccccacaggagatacaaatgttctcacatcaacccctgccttctctgacaccagtaggattcaaacaaagtcaaagctctcactgactcctgggttgatggagaccagcatctctgaagagaccagctctgccacagaaaaaagcactgtcctttctagtgtgcccactggtgctactactgaggtctccaggacagaagccatctcttctagcagaacatccatcccaggccctgctcaatccacaatgtcatcagacacctccatggaaaccatcactagaatttctacccccctcacaaggaaagaatcaacagacatggccatcacccccaaaacaggtccttctggggctacctcgcagggtacctttaccttggactcatcaagcacagcctcctggccaggaactcactcagctacaactcagagatttccacagtcagtggtgacaactcctatgagcagaggtcctgaggatgtgtcatggccaagcccgctgtctgtggaaaaaaacagccctccatcttccctggtatcttcatcttcagtaacctcaccttcgccactttattccacaccatctgggagtagccactcctctcctgtccctgtcacttctcttttcacctctatcatgatgaaggccacagacatgttggatgcaagtttggaacctgagaccacttcagctcccaatatgaatatcacctcagatgagagtctggccgcttctaaagccaccacggagacagaggcaattcacgtttttgaaaatacagcagcgtcccatgtggaaaccaccagtgctacagaggaactctattcctcttccccaggcttctcagagccaacaaaagtgatatctccagtggtcacctcttcctctataagagacaacatggtttccacaacaatgcctggctcctctggcattacaaggattgagatagagtcaatgtcatctctgacccctggactgagggagaccagaacctcccaggacatcacctcatccacagagacaagcactgtcctttacaagatgccctctggtgccactcctgaggtctccaggacagaagttatgccctctagcagaacatccattcctggccctgctcagtccacaatgtcactagacatctccgatgaagttgtcaccaggctgtctacctctcccatcatgacagaatctgcagaaataaccatcaccacccaaacaggttattctctggctacatcccaggttacccttcccttgggcacctcaatgacctttttgtcagggacccactcaactatgtctcaaggactttcacactcagagatgaccaatcttatgagcaggggtcctgaaagtctgtcatggacgagccctcgctttgtggaaacaactagatcttcctcttctctgacatcattacctctcacgacctcactttctcctgtgtcctccacattactagacagtagcccctcctctcctcttcctgtgacttcacttatcctcccaggcctggtgaagactacagaagtgttggatacaagctcagagcctaaaaccagttcatctccaaatttgagcagcacctcagttgaaataccggccacctctgaaatcatgacagatacagagaaaattcatccttcctcaaacacagcggtggccaaagtgaggacctccagttctgttcatgaatctcattcctctgtcctagctgactcagaaacaaccataaccataccttcaatgggtatcacctccgctgtggacgataccactgttttcacatcaaatcctgccttctctgagactaggaggattccgacagagccaacattctcattgactcctggattcagggagactagcacctctgaagagaccacctcaatcacagaaacaagtgcagtcctttatggagtgcccactagtgctactactgaagtctccatgacagaaatcatgtcctctaatagaatacacatccctgactctgatcagtccacgatgtctccagacatcatcactgaagtgatcaccaggctctcttcctcatccatgatgtcagaatcaacacaaatgaccatcaccacccaaaaaagttctcctggggctacagcacagagtactcttaccttggccacaacaacagcccccttggcaaggacccactcaactgttcctcctagatttttacactcagagatgacaactcttatgagtaggagtcctgaaaatccatcatggaagagctctctctttgtggaaaaaactagctcttcatcttctctgttgtccttacctgtcacgacctcaccttctgtttcttccacattaccgcagagtatcccttcctcctctttttctgtgacttcactcctcaccccaggcatggtgaagactacagacacaagcacagaacctggaaccagtttatctccaaatctgagtggcacctcagttgaaatactggctgcctctgaagtcaccacagatacagagaaaattcatccttcttcaagcatggcagtgaccaatgtgggaaccaccagttctggacatgaactatattcctctgtttcaatccactcggagccatccaaggctacatacccagtgggtactccctcttccatggctgaaacctctatttccacatcaatgcctgctaattttgagaccacaggatttgaggctgagccattttctcatttgacttctggatttaggaagacaaacatgtccctggacaccagctcagtcacaccaacaaatacaccttcttctcctgggtccactcaccttttacagagttccaagactgatttcacctcttctgcaaaaacatcatccccagactggcctccagcctcacagtatactgaaattccagtggacataatcaccccctttaatgcttctccatctattacggagtccactgggataacctccttcccagaatccaggtttactatgtctgtaacagaaagtactcatcatctgagtacagatttgctgccttcagctgagactatttccactggcacagtgatgccttctctatcagaggccatgacttcatttgccaccactggagttccacgagccatctcaggttcaggtagtccattctctaggacagagtcaggccctggggatgctactctgtccaccattgcagagagcctgccttcatccactcctgtgccattctcctcttcaaccttcactaccactgattcttcaaccatcccagccctccatgagataacttcctcttcagctaccccatatagagtggacaccagtcttgggacagagagcagcactactgaaggacgcttggttatggtcagtactttggacacttcaagccaaccaggcaggacatcttcatcacccattttggataccagaatgacagagagcgttgagctgggaacagtgacaagtgcttatcaagttccttcactctcaacacggttgacaagaactgatggcattatggaacacatcacaaaaatacccaatgaagcagcacacagaggtaccataagaccagtcaaaggccctcagacatccacttcgcctgccagtcctaaaggactacacacaggagggacaaaaagaatggagaccaccaccacagctctgaagaccaccaccacagctctgaagaccacttccagagccaccttgaccaccagtgtctatactcccactttgggaacactgactcccctcaatgcatcaatgcaaatggccagcacaatccccacagaaatgatgatcacaaccccatatgttttccctgatgttccagaaacgacatcctcattggctaccagcctgggagcagaaaccagcacagctcttcccaggacaaccccatctgttttcaatagagaatcagagaccacagcctcactggtctctcgttctggggcagagagaagtccggttattcaaactctagatgtttcttctagtgagccagatacaacagcttcatgggttatccatcctgcagagaccatcccaactgtttccaagacaacccccaattttttccacagtgaattagacactgtatcttccacagccaccagtcatggggcagacgtcagctcagccattccaacaaatatctcacctagtgaactagatgcactgaccccactggtcactatttcggggacagatactagtacaacattcccaacactgactaagtccccacatgaaacagagacaagaaccacatggctcactcatcctgcagagaccagctcaactattcccagaacaatccccaatttttctcatcatgaatcagatgccacaccttcaatagccaccagtcctggggcagaaaccagttcagctattccaattatgactgtctcacctggtgcagaagatctggtgacctcacaggtcactagttctgggacagacagaaatatgactattccaactttgactctttctcctggtgaaccaaagacgatagcctcattagtcacccatcctgaagcacagacaagttcggccattccaacttcaactatctcgcctgctgtatcacggttggtgacctcaatggtcaccagtttggcggcaaagacaagtacaactaatcgagctctgacaaactcccctggtgaaccagctacaacagtttcattggtcacgcatcctgcacagaccagcccaacagttccctggacaacttccatttttttccatagtaaatcagacaccacaccttcaatgaccaccagtcatggggcagaatccagttcagctgttccaactccaactgtttcaactgaggtaccaggagtagtgacccctttggtcaccagttctagggcagtgatcagtacaactattccaattctgactctttctcctggtgaaccagagaccacaccttcaatggccaccagtcatggggaagaagccagttctgctattccaactccaactgtttcacctggggtaccaggagtggtgacctctctggtcactagttctagggcagtgactagtacaactattccaattctgactttttctcttggtgaaccagagaccacaccttcaatggccaccagtcatgggacagaagctggctcagctgttccaactgttttacctgaggtaccaggaatggtgacctctctggttgctagttctagggcagtaaccagtacaactcttccaactctgactctttctcctggtgaaccagagaccacaccttcaatggccaccagtcatggggcagaagccagctcaactgttccaactgtttcacctgaggtaccaggagtggtgacctctctggtcactagttctagtggagtaaacagtacaagtattccaactctgattctttctcctggtgaactagaaaccacaccttcaatggccaccagtcatggggcagaagccagctcagctgttccaactccaactgtttcacctggggtatcaggagtggtgacccctctggtcactagttccagggcagtgaccagtacaactattccaattctaactctttcttctagtgagccagagaccacaccttcaatggccaccagtcatggggtagaagccagctcagctgttctaactgtttcacctgaggtaccaggaatggtgacctctctggtcactagttctagagcagtaaccagtacaactattccaactctgactatttcttctgatgaaccagagaccacaacttcattggtcacccattctgaggcaaagatgatttcagccattccaactttagctgtctcccctactgtacaagggctggtgacttcactggtcactagttctgggtcagagaccagtgcgttttcaaatctaactgttgcctcaagtcaaccagagaccatagactcatgggtcgctcatcctgggacagaagcaagttctgttgttccaactttgactgtctccactggtgagccgtttacaaatatctcattggtcacccatcctgcagagagtagctcaactcttcccaggacaacctcaaggttttcccacagtgaattagacactatgccttctacagtcaccagtcctgaggcagaatccagctcagccatttcaacaactatttcacctggtataccaggtgtgctgacatcactggtcactagctctgggagagacatcagtgcaacttttccaacagtgcctgagtccccacatgaatcagaggcaacagcctcatgggttactcatcctgcagtcaccagcacaacagttcccaggacaacccctaattattctcatagtgaaccagacaccacaccatcaatagccaccagtcctggggcagaagccacttcagattttccaacaataactgtctcacctgatgtaccagatatggtaacctcacaggtcactagttctgggacagacaccagtataactattccaactctgactctttcttctggtgagccagagaccacaacctcatttatcacctattctgagacacacacaagttcagccattccaactctccctgtctcccctggtgcatcaaagatgctgacctcactggtcatcagttctgggacagacagcactacaactttcccaacactgacggagaccccatatgaaccagagacaacagccatacagctcattcatcctgcagagaccaacacaatggttcccaggacaactcccaagttttcccatagtaagtcagacaccacactcccagtagccatcaccagtcctgggccagaagccagttcagctgtttcaacgacaactatctcacctgatatgtcagatctggtgacctcactggtccctagttctgggacagacaccagtacaaccttcccaacattgagtgagaccccatatgaaccagagactacagccacgtggctcactcatcctgcagaaaccagcacaacggtttctgggacaattcccaacttttcccataggggatcagacactgcaccctcaatggtcaccagtcctggagtagacacgaggtcaggtgttccaactacaaccatcccacccagtataccaggggtagtgacctcacaggtcactagttctgcaacagacactagtacagctattccaactttgactccttctcctggtgaaccagagaccacagcctcatcagctacccatcctgggacacagactggcttcactgttccaattcggactgttccctctagtgagccagatacaatggcttcctgggtcactcatcctccacagaccagcacacctgtttccagaacaacctccagtttttcccatagtagtccagatgccacacctgtaatggccaccagtcctaggacagaagccagttcagctgtactgacaacaatctcacctggtgcaccagagatggtgacttcacagatcactagttctggggcagcaaccagtacaactgttccaactttgactcattctcctggtatgccagagaccacagccttattgagcacccatcccagaacagagacaagtaaaacatttcctgcttcaactgtgtttcctcaagtatcagagaccacagcctcactcaccattagacctggtgcagagactagcacagctctcccaactcagacaacatcctctctcttcaccctacttgtaactggaaccagcagagttgatctaagtccaactgcttcacctggtgtttctgcaaaaacagccccactttccacccatccagggacagaaaccagcacaatgattccaacttcaactctttcccttggtttactagagactacaggcttactggccaccagctcttcagcagagaccagcacgagtactctaactctgactgtttcccctgctgtctctgggctttccagtgcctctataacaactgataagccccaaactgtgacctcctggaacacagaaacctcaccatctgtaacttcagttggacccccagaattttccaggactgtcacaggcaccactatgaccttgataccatcagagatgccaacaccacctaaaaccagtcatggagaaggagtgagtccaaccactatcttgagaactacaatggttgaagccactaatttagctaccacaggttccagtcccactgtggccaagacaacaaccaccttcaatacactggctggaagcctctttactcctctgaccacacctgggatgtccaccttggcctctgagagtgtgacctcaagaacaagttataaccatcggtcctggatctccaccaccagcagttataaccgtcggtactggacccctgccaccagcactccagtgacttctacattctccccagggatttccacatcctccatccccagctccacagcagccacagtcccattcatggtgccattcaccctcaacttcaccatcaccaacctgcagtacgaggaggacatgcggcaccctggttccaggaagttcaacgccacagagagagaactgcagggtctgctcaaacccttgttcaggaatagcagtctggaatacctctattcaggctgcagactagcctcactcaggccagagaaggatagctcagccacggcagtggatgccatctgcacacatcgccctgaccctgaagacctcggactggacagagagcgactgtactgggagctgagcaatctgacaaatggcatccaggagctgggcccctacaccctggaccggaacagtctctatgtcaatggtttcacccatcgaagctctatgcccaccaccagcactcctgggacctccacagtggatgtgggaacctcagggactccatcctccagccccagccccacgactgctggccctctcctgatgccgttcaccctcaacttcaccatcaccaacctgcagtacgaggaggacatgcgtcgcactggctccaggaagttcaacaccatggagagtgtcctgcagggtctgctcaagcccttgttcaagaacaccagtgttggccctctgtactctggctgcagattgaccttgctcaggcccgagaaagatggggcagccactggagtggatgccatctgcacccaccgccttgaccccaaaagccctggactcaacagggagcagctgtactgggagctaagcaaactgaccaatgacattgaagagctgggcccctacaccctggacaggaacagtctctatgtcaatggtttcacccatcagagctctgtgtccaccaccagcactcctgggacctccacagtggatctcagaacctcagggactccatcctccctctccagccccacaattatggctgctggccctctcctggtaccattcaccctcaacttcaccatcaccaacctgcagtatggggaggacatgggtcaccctggctccaggaagttcaacaccacagagagggtcctgcagggtctgcttggtcccatattcaagaacaccagtgttggccctctgtactctggctgcagactgacctctctcaggtctgagaaggatggagcagccactggagtggatgccatctgcatccatcatcttgaccccaaaagccctggactcaacagagagcggctgtactgggagctgagccaactgaccaatggcatcaaagagctgggcccctacaccctggacaggaacagtctctatgtcaatggtttcacccatcggacctctgtgcccaccagcagcactcctgggacctccacagtggaccttggaacctcagggactccattctccctcccaagccccgcaactgctggccctctcctggtgctgttcaccctcaacttcaccatcaccaacctgaagtatgaggaggacatgcatcgccctggctccaggaagttcaacaccactgagagggtcctgcagactctgcttggtcctatgttcaagaacaccagtgttggccttctgtactctggctgcagactgaccttgctcaggtccgagaaggatggagcagccactggagtggatgccatctgcacccaccgtcttgaccccaaaagccctggagtggacagggagcagctatactgggagctgagccagctgaccaatggcatcaaagagctgggcccctacaccctggacaggaacagtctctatgtcaatggtttcacccattggatccctgtgcccaccagcagcactcctgggacctccacagtggaccttgggtcagggactccatcctccctccccagccccacaactgctggccctctcctggtgccgttcaccctcaacttcaccatcaccaacctgaagtacgaggaggacatgcattgccctggctccaggaagttcaacaccacagagagagtcctgcagagtctgcttggtcccatgttcaagaacaccagtgttggccctctgtactctggctgcagactgaccttgctcaggtccgagaaggatggagcagccactggagtggatgccatctgcacccaccgtcttgaccccaaaagccctggagtggacagggagcagctatactgggagctgagccagctgaccaatggcatcaaagagctgggtccctacaccctggacagaaacagtctctatgtcaatggtttcacccatcagacctctgcgcccaacaccagcactcctgggacctccacagtggaccttgggacctcagggactccatcctccctccccagccctacatctgctggccctctcctggtgccattcaccctcaacttcaccatcaccaacctgcagtacgaggaggacatgcatcacccaggctccaggaagttcaacaccacggagcgggtcctgcagggtctgcttggtcccatgttcaagaacaccagtgtcggccttctgtactctggctgcagactgaccttgctcaggcctgagaagaatggggcagccactggaatggatgccatctgcagccaccgtcttgaccccaaaagccctggactcaacagagagcagctgtactgggagctgagccagctgacccatggcatcaaagagctgggcccctacaccctggacaggaacagtctctatgtcaatggtttcacccatcggagctctgtggcccccaccagcactcctgggacctccacagtggaccttgggacctcagggactccatcctccctccccagccccacaacagctgttcctctcctggtgccgttcaccctcaactttaccatcaccaatctgcagtatggggaggacatgcgtcaccctggctccaggaagttcaacaccacagagagggtcctgcagggtctgcttggtcccttgttcaagaactccagtgtcggccctctgtactctggctgcagactgatctctctcaggtctgagaaggatggggcagccactggagtggatgccatctgcacccaccaccttaaccctcaaagccctggactggacagggagcagctgtactggcagctgagccagatgaccaatggcatcaaagagctgggcccctacaccctggaccggaacagtctctacgtcaatggtttcacccatcggagctctgggctcaccaccagcactccttggacttccacagttgaccttggaacctcagggactccatcccccgtccccagccccacaaccaccggccctctcctggtgccattcacactcaacttcaccatcactaacctacagtatgaggagaacatgggtcaccctggctccaggaagttcaacatcacggagagtgttctgcagggtctgctcaagcccttgttcaagagcaccagtgttggccctctgtattctggctgcagactgaccttgctcaggcctgagaaggatggagtagccaccagagtggacgccatctgcacccaccgccctgaccccaaaatccctgggctagacagacagcagctatactgggagctgagccagctgacccacagcatcactgagctgggaccctacaccctggatagggacagtctctatgtcaatggtttcacccagcggagctctgtgcccaccaccagcactcctgggactttcacagtacagccggaaacctctgagactccatcatccctccctggccccacagccactggccctgtcctgctgccattcaccctcaattttaccatcactaacctgcagtatgaggaggacatgcgtcgccctggctccaggaagttcaacaccacggagagggtccttcagggtctgcttatgcccttgttcaagaacaccagtgtcagctctctgtactctggttgcagactgaccttgctcaggcctgagaaggatggggcagccaccagagtggatgctgtctgcacccatcgtcctgaccccaaaagccctggactggacagagagcggctgtactggaagctgagccagctgacccacggcatcactgagctgggcccctacaccctggacaggcacagtctctatgtcaatggtttcacccatcagagctctatgacgaccaccagaactcctgatacctccacaatgcacctggcaacctcgagaactccagcctccctgtctggacccatgaccgccagccctctcctggtgctattcacaattaacttcaccatcactaacctgcggtatgaggagaacatgcatcaccctggctctagaaagtttaacaccacggagagagtccttcagggtctgctcaggcctgtgttcaagaacaccagtgttggccctctgtactctggctgcagactgaccttgctcaggcccaagaaggatggggcagccaccaaagtggatgccatctgcacctaccgccctgatcccaaaagccctggactggacagagagcagctatactgggagctgagccagctgacccacagcatcactgagctgggcccctacaccctggacagggacagtctctatgtcaatggtttcacacagcggagctctgtgcccaccactagcattcctgggacccccacagtggacctgggaacatctgggactccagtttctaaacctggtccctcggctgccagccctctcctggtgctattcactctcaacttcaccatcaccaacctgcggtatgaggagaacatgcagcaccctggctccaggaagttcaacaccacggagagggtccttcagggcctgctcaggtccctgttcaagagcaccagtgttggccctctgtactctggctgcagactgactttgctcaggcctgaaaaggatgggacagccactggagtggatgccatctgcacccaccaccctgaccccaaaagccctaggctggacagagagcagctgtattgggagctgagccagctgacccacaatatcactgagctgggcccctatgccctggacaacgacagcctctttgtcaatggtttcactcatcggagctctgtgtccaccaccagcactcctgggacccccacagtgtatctgggagcatctaagactccagcctcgatatttggcccttcagctgccagccatctcctgatactattcaccctcaacttcaccatcactaacctgcggtatgaggagaacatgtggcctggctccaggaagttcaacactacagagagggtccttcagggcctgctaaggcccttgttcaagaacaccagtgttggccctctgtactctggctgcaggctgaccttgctcaggccagagaaagatggggaagccaccggagtggatgccatctgcacccaccgccctgaccccacaggccctgggctggacagagagcagctgtatttggagctgagccagctgacccacagcatcactgagctgggcccctacacactggacagggacagtctctatgtcaatggtttcacccatcggagctctgtacccaccaccagcaccggggtggtcagcgaggagccattcacactgaacttcaccatcaacaacctgcgctacatggcggacatgggccaacccggctccctcaagttcaacatcacagacaacgtcatgcagcacctgctcagtcctttgttccagaggagcagcctgggtgcacggtacacaggctgcagggtcatcgcactaaggtctgtgaagaacggtgctgagacacgggtggacctcctctgcacctacctgcagcccctcagcggcccaggtctgcctatcaagcaggtgttccatgagctgagccagcagacccatggcatcacccggctgggcccctactctctggacaaagacagcctctaccttaacggttacaatgaacctggtccagatgagcctcctacaactcccaagccagccaccacattcctgcctcctctgtcagaagccacaacagccatggggtaccacctgaagaccctcacactcaacttcaccatctccaatctccagtattcaccagatatgggcaagggctcagctacattcaactccaccgagggggtccttcagcacctgctcagacccttgttccagaagagcagcatgggccccttctacttgggttgccaactgatctccctcaggcctgagaaggatggggcagccactggtgtggacaccacctgcacctaccaccctgaccctgtgggccccgggctggacatacagcagctttactgggagctgagtcagctgacccatggtgtcacccaactgggcttctatgtcctggacagggatagcctcttcatcaatggctatgcaccccagaatttatcaatccggggcgagtaccagataaatttccacattgtcaactggaacctcagtaatccagaccccacatcctcagagtacatcaccctgctgagggacatccaggacaaggtcaccacactctacaaaggcagtcaactacatgacacattccgcttctgcctggtcaccaacttgacgatggactccgtgttggtcactgtcaaggcattgttctcctccaatttggaccccagcctggtggagcaagtctttctagataagaccctgaatgcctcattccattggctgggctccacctaccagttggtggacatccatgtgacagaaatggagtcatcagtttatcaaccaacaagcagctccagcacccagcacttctacctgaatttcaccatcaccaacctaccatattcccaggacaaagcccagccaggcaccaccaattaccagaggaacaaaaggaatattgaggatgcgctcaaccaactcttccgaaacagcagcatcaagagttatttttctgactgtcaagtttcaacattcaggtctgtccccaacaggcaccacaccggggtggactccctgtgtaacttctcgccactggctcggagagtagacagagttgccatctatgaggaatttctgcggatgacccggaatggtacccagctgcagaacttcaccctggacaggagcagtgtccttgtggatgggtattctcccaacagaaatgagcccttaactgggaattctgaccttcccttctgggctgtcatcctcatcggcttggcaggactcctgggagtcatcacatgcctgatctgcggtgtcctggtgaccacccgccggcggaagaaggaaggagaatacaacgtccagcaacagtgcccaggctactaccagtcacacctagacctggaggatctgcaatgactggaacttgccggtgcctggggtgcctttcccccagccagggtccaaagaagcttggctggggcagaaataaaccatattggtcgga

SEQ ID NO: 172 - DNA, 3081 bp, Homo sapiens
cttttttgatcttcgaaaagaattcaagaaatgttgccctggttcacctgatattgacaaactggacgttgccacaatgacagagtatttaaattttgagaagagtagttcagtctctcgatatggagcctctcaagttgaagatatggggaatataattttagcaatgatttcagagccttataatcacaggttttcagatccagagagagtgaattacaagtttgaaagtggaacttgcagcaagatggaacttattgatgataacaccgtagtcagggcacgaggtttaccatggcagtcttcagatcaagatattgcaagattcttcaaaggactcaatattgccaagggaggtgcagcactttgtctgaatgctcagggtcgaaggaacggagaagctctggttaggtttgtaagtgaggagcaccgagacctagcactacagaggcacaaacatcacatggggacccggtatattgaggtttacaaagcaacaggtgaagatttccttaaaattgctggtggtacttccaatgaggtagcccagtttctctccaaggaaaatcaagtcattgtccgcatgcgggggctccctttcacggccacagctgaagaagtggtggccttctttggacagcattgccctattactgggggaaaggaaggcatcctctttgtcacctacccagatggtaggccaacaggggacgcttttgtcctctttgcctgtgaggaatatgcacagaatgcgttgaggaagcataaagacttgttgggtaaaagatacattgaactcttcaggagcacagcagctgaagttcagcaggtgctgaatcgattctcctcggcccctctcattccacttccaacccctcccattattccagtactacctcagcaatttgtgccccctacaaatgttagagactgtatacgccttcgaggtcttccctatgcagccacaattgaggacatcctggatttcctgggggagttcgccacagatattcgtactcatggggttcacatggttttgaatcaccagggccgcccatcaggagatgcctttatccagatgaagtctgcggacagagcatttatggctgcacagaagtgtcataaaaaaaacatgaaggacagatatgttgaagtctttcagtgttcagctgaggagatgaactttgtgttaatggggggcactttaaatcgaaatggcttatccccaccgccatgtaagttaccatgcctgtctcctccctcctacacatttccagctcctgctgcagttattcctacagaagctgccatttaccagccctctgtgattttgaatccacgagcactgcagccctccacagcgtactacccagcaggcactcagctcttcatgaactacacagcgtactatcccagtatgcaaccgaggatggacttatacacacaaatgaccaggccaggactctacccaaagaatgggtttgtatttaagggccccagcagttagaacatcctcagaaaagaagtgtttgaaagatgtatggtgatcttgaaacctccagacacaagaaaacttctagcaaattcaggggaagtttgtctacactcaggctgcagtattttcagcaaacttgattggacaaacgggcctgtgccttatcttttggtggagtgaaaaaatttgagccagtgaagccaaatcgtaacttacagcaagcagcatgcagcatacctggctctttgctgattgcaaataggcatttaaaatgtgaatttggaatcagatgtctccattacttccagttaaagtggcatcataggcgtttcctaagttttaagtcttggataaaaactccaccagtgtctaccatctccaccatgaactctgttaaggaagcttcattttcgtatattcccgctcttttctcttcatttccctgtcttctgcataatcatgccttcttgctaagtaattcaagcataagatcttggaataataaaatcacaatcttaggagaaagaataaaattgttattttcccagtctcttggccatgatgatatcttatgattaaaaacaaattaaattttaaaacacctgaagatatattagaagaaattgtgcaccctccacaaaacatacaaagtttaaaagtttggatctttttctcagcaggtatcagttgtaaataatgaattaggggccaaaatgcaaaacgaaaaatgaagcagctacatgtagttagtaatttctagtttgaactgtaattgaatattgtggcttcatatgtattattttatattgtacttttttcattattgatggtttggactttaataagagaaattccatagtttttaatatcccagaagtgagacaatttgaacagtgtattctagaaaacaatacactaactgaacagaagtgaatgcttatatatattatgatagccttaaacctttttcctctaatgccttaactgtcaaataattataaccttttaaagcataggactatagtcagcatgctagactgagaggtaaacactgatgcaattagaacaggtactgatgctgtcagtgtttaacactatgtttagctgtgtttatgctataaaagtgcaatattagacactagctagtactgctgcctcatgtaactccaaagaaaacaggatttcattaagtgcattgaatgtggctatttctctaagttactcatattgtcctttgcttgaatgcaatgccgtgcagatttatgtggctgctatttttattttctgtgcattactttaacaccttaaagggagaagcaaacatttccttcttcagctgactggcaatggccctttaactgcaataggaagaaaaaaaaaaaggtttgtgtgaaaattggtgataactggcacttaagatcgaaaagaaatttctgtatacttgatgccttaagatgcccaaagctgcccaaagctctgaaagactttaagataggcagtaatgcttactacaatactactgagtttttgtagagttaacatttgataataaaacttgcctgtttaatctcaaaaaaaaaaaaaaa

SEQ ID NO: 173 - DNA, 2974 bp, Homo sapiens
gtgtgcgtgatggagaaaattgggcaccagggctgctcccgagattctcagatctgatttccacgcttgctaccaaaatagtctgggcaggccacttttggaagtaggcgttatctagtgagcaggcggccgctttcgatttcgctttcccctaaatggctgagcttctcgccagcgcaggatcagcctgttcctgggactttccgagagccccgccctcgttccctcccccagccgccagtaggggaggactcggcggtacccggagcttcaggccccaccggggcgcggagagtcccaggcccggccgggaccgggacggcgtccgagtgccaatggctagctctaggtgtcccgctccccgcgggtgccgctgcctccccggagcttctctcgcatggctggggacagtactgctacttctcgccgactgggtgctgctccggaccgcgctgccccgcatattctccctgctggtgcccaccgcgctgccactgctccgggtctgggcggtgggcctgagccgctgggccgtgctctggctgggggcctgcggggtcctcagggcaacggttggctccaagagcgaaaacgcaggtgcccagggctggctggctgctttgaagccattagctgcggcactgggcttggccctgccgggacttgccttgttccgagagctgatctcatggggagcccccgggtccgcggatagcaccaggctactgcactggggaagtcaccctaccgccttcgttgtcagttatgcagcggcactgcccgcagcagccctgtggcacaaactcgggagcctctgggtgcccggcggtcagggcggctctggaaaccctgtgcgtcggcttctaggctgcctgggctcggagacgcgccgcctctcgctgttcctggtcctggtggtcctctcctctcttggggagatggccattccattctttacgggccgcctcactgactggattctacaagatggctcagccgataccttcactcgaaacttaactctcatgtccattctcaccatagccagtgcagtgctggagttcgtgggtgacgggatctataacaacaccatgggccacgtgcacagccacttgcagggagaggtgtttggggctgtcctgcgccaggagacggagtttttccaacagaaccagacaggtaacatcatgtctcgggtaacagaggacacgtccaccctgagtgattctctgagtgagaatctgagcttatttctgtggtacctggtgcgaggcctatgtctcttggggatcatgctctggggatcagtgtccctcaccatggtcaccctgatcaccctgcctctgcttttccttctgcccaagaaggtgggaaaatggtaccagttgctggaagtgcaggtgcgggaatctctggcaaagtccagccaggtggccattgaggctctgtcggccatgcctacagttcgaagctttgccaacgaggagggcgaagcccagaagtttagggaaaagctgcaagaaataaagacactcaaccagaaggaggctgtggcctatgcagtcaactcctggaccactagtatttcaggtatgctgctgaaagtgggaatcctctacattggtgggcagctggtgaccagtggggctgtaagcagtgggaaccttgtcacatttgttctctaccagatgcagttcacccaggctgtggaggtactgctctccatctaccccagagtacagaaggctgtgggctcctcagagaaaatatttgagtacctggaccgcacccctcgctgcccacccagtggtctgttgactcccttacacttggagggccttgtccagttccaagatgtctcctttgcctacccaaaccgcccagatgtcttagtgctacaggggctgacattcaccctacgccctggcgaggtgacggcgctggtgggacccaatgggtctgggaagagcacagtggctgccctgctgcagaatctgtaccagcccaccgggggacagctgctgttggatgggaagccccttccccaatatgagcaccgctacctgcacaggcaggtggctgcagtgggacaagagccacaggtatttggaagaagtcttcaagaaaatattgcctatggcctgacccagaagccaactatggaggaaatcacagctgctgcagtaaagtctggggcccatagtttcatctctggactccctcagggctatgacacagaggtagacgaggctgggagccagctgtcagggggtcagcgacaggcagtggcgttggcccgagcattgatccggaaaccgtgtgtacttatcctggatgatgccaccagtgccctggatgcaaacagccagttacaggtggagcagctcctgtacgaaagccctgagcggtactcccgctcagtgcttctcatcacccagcacctcagcctggtggagcaggctgaccacatcctctttctggaaggaggcgctatccgggaggggggaacccaccagcagctcatggagaaaaaggggtgctactgggccatggtgcaggctcctgcagatgctccagaatgaaagccttctcagacctgcgcactccatctccctcccttttcttctctctgtggtggagaaccacagctgcagagtaggcagctgcctccaggatgagttacttgaaatttgccttgagtgtgttacctcctttccaagctcctcgtgataatgcagacttcctggagtacaaacacaggatttgtaattccttactgtaacggagtttagagccagggctgatgctttggtgtggccagcactctgaaactgagaaatgttcagaatgtacggaaagatgatcagctattttcaacataactgaaggcatatgctggcccataaacaccctgtaggttcttgatatttataataaaattggtgttttgtaaaaaaaaaaaaaaaaaaaaaaa

SEQ ID NO: 174 - DNA, 1321 bp, Homo sapiens
gaactaccaccggcgtgcgttcgcaggtagatcgcggtgccagttgccatggagccggccgggccctgtggcttctgcccggcgggggaggtccagccagcgcgttacacctgccctcgctgtaatgcgccctactgctcgctgcgctgctaccggacgcatggcacctgcgcagaaaacttctaccgtgaccaggtgctgggagagctccgcggttgcagcgctcctcccagccgcctagcaagcgccctacgccggctgcgtcagcaacgcgagaccgaggacgagcctggggaagcaggcctcagctccggcccggcgcccggcggcctatcgggactctgggagcggctggcgccgggcgaaaaagctgccttcgagcggctgctgagccgcggtgaggccgggcggctgctgcctccatggcggccgtggtggtggaaccgcggagccggaccgcagcttctggaggagctggataatgccccgggtagtgacgccgcggagctggagctcgcccctgcgaggaccccgccggattctgtgaaagatgcctccgccgcggagcccgcggccgccgagcgggttcttggagatgtcccgggggcctgcacgcccgtcgtacccacccgcatccccgcgatagtcagcctgagccgcggcccagtctcgccgctcgtgcgcttccagctgcccaatgtgctgttcgcctacgcgcatactctcgccctgtatcacggcggtgacgacgcgctgctctctgacttctgtgccacactgctcggcgtttccggagccctgggtgcccagcaagtcttcgcctctgcggaagaagccctgcaggcggcagcccacgtgctggaagcaggcgagcacccgccggggcccctgggcacacgaggggctatgcacgaggtcgcccgcatcctgctgggcgagggcccgaccaaccagaaaggctacacgctggcagcactgggggacctggcacagaccctgggccgtgcccggaaacaggccgtggctagagaagagcgagatcatctttaccgggcccggaaaaagtgccagttcctcctggcctggaccaacgaaaatgaggcggccctcacacccctggctctagactgcgccagggctcaccaagcccatgctgtggtagccgaggaggtggccgccctcactggggagctggagcggctttggggaggccccgtgccacctgccccaagaactctcattgaggagctccctagctgaacgggttaccctggtcattaataaagctgtgactggtcaaaaaaaaaaaaaaaaaaaaaaa

SEQ ID NO: 175 - DNA, 1364 bp, Homo sapiens
gcctgatgacgtggcttggcaacgtccctaccgccgccgcttcccgggaacctggcgccgccggaactgatcgcggcctagtcccgacgcgtgtgtgctagtgagccggagccggcgacggcggcagtggcggcccggcctgcaggagcccgacggggtctctgccatgggggagtgacgcgcctgcacccgctgttccgcggcagcggcgagacatgaggagaccccgcgacaggggcagcggcggcggctcgtgagccccgggatggaggagaaatacggcggggacgtgctggccggccccggcggcggcggcggccttgggccggtggacgtacccagcgctcgattaacaaaatatattgtgttactatgtttcactaaatttttgaaggctgtgggacttttcgaatcatatgatctcctaaaagctgttcacattgttcagttcatttttatattaaaacttgggactgcattttttatggttttgtttcaaaagccattttcttctgggaaaactattaccaaacaccagataattggatcactaaaaattcctggtagaaaagaatttaaagacaaaaagttaaatgatcctaggaaactagtgggaaactgagaaatcataaaattgtactctgaagaaaaagatttcaaaatctaccagcagacaagaatatagataatggaaaacagaatactgtcctttttttttttctttctttttttgagaaagagtcttgctccatcgcccaggctgcagtgcagtgacacgatcttgtctcactgcaacctctgcctcccgggttcaagcgattctcctgcctcagcctcctgagtagctggaattacaggcacccaccaccacacccagctcatttttgtatttttagtagagacggggcttcattcaccacattggccagcctggtcttgaactcctgacctcaggtgatctgcctgcctcggcctcacaaagtgctaggattacaggcatgagccacagcacccggcccagaataagaatactgtcttggaaatctagacttagtcaagggatcttatgttttctatttacaaaatatgtaatgatttcacctttaaaatatttgttattattatctttctgtattttatttaaaatttggatatatagcaaaatatatgtgactgaaatttttaatttttttgtttccatttatagtggatcaaaatatttaaacatgcagttgctgggtgtattatttcactcttgtggttttttggcctcactctttgtggaccactaaggtaaataaaaatgcatattttgaaaaaaaaaaaaaaaaaaaaaaaaaaaaaaaaaaaaaaaaaaaaaaaaa

SEQ ID NO: 176 - DNA, 787 bp, Homo sapiens
ggggagccttctgctgctttgctctctgggagatccagctccttgctctgtgtcccagtagaacatgatgtggcccatgcacaccccactgctgctgctgactgccttgatggtggccgtggccgggagtgcctcggcccaatctaggaccttggcaggtggcatccatgccacagacctcaatgacaagagtgtgcagtgtgccctggactttgccatcagcgagtacaacaaggtcattaataaggatgagtactacagccgccctctgcaggtgatggctgcctaccagcagatcgtgggtggggtgaactactacttcaatgtgaagttcggtcgaaccacatgcaccaagtcccagcccaacttggacaactgtcccttcaatgaccagccaaaactgaaagaggaagagttctgctctttccagatcaatgaagttccctgggaggataaaatttccattctgaactacaagtgccggaaagtctaggggtctgtgcaaggcctgtcacactgaccacctcctactcccaccccctgtagtgctcccacccctggactggtggcccccaccctgggggaggtctcctcatgcgcctgcaccaggagacagacacagaaggtggcaggaggcctttgttgctcagcaggaggctctgcccttgctccttccttcttgcttctcatagccccagtgtgcagtgcacactctcccacctcctgcaattaaacagtagcattgcaaaaaaaaaaaaaaaaaaaaaaaaaaaaaaaaaaaaaaaaa

SEQ ID NO: 177 - DNA, 3571 bp, Homo sapiens
cacagcttgggactgctgaggggcaggcggctgcaggctaggggcggctcggagtccgctggccacccagctgagaggagaggcgcccccggggacgcactgagattatgaggctctggcctccactggccactcactcgtgaccctttccaccacggcggagccttccaagcctacctcctgccgtgtggtgatctacctgcagcgggagatgtcgggggacacctgcctgtgcccagcctcaggggccaagcccaagctcagtggcttcaagggaggagggttgggcaacaagtatgtccagctcaacgtgggcggctctctgtactacaccactgtgcgggccctgacccgccacgacaccatgctcaaggccatgttcagtgggcgcatggaggtgctgaccgacaaagaaggctggatcctcatagaccgttgtggaaagcactttggcaccattttgaattacctccgagatgacaccatcaccctccctcagaaccggcaagaaatcaaggaattgatggctgaagcaaagtattacctcatccaggggctggtgaatatgtgccagagtgccctgcaggacaagaaggactcctaccagcctgtgtgcaacatccccatcatcacatccctaaaggaggaggagcggctcatcgaatcctccaccaagcccgtggtgaagctgctgtacaacagaagcaacaacaagtattcctacaccagcaactctgacgaccacctgctgaaaaacatcgagctgtttgacaagctctccctgcgcttcaacggccgcgtgctcttcatcaaggatgtcattggtgacgagatctgctgctggtccttttatggccagggccgtaagctggcagaggtgtgctgtacctccatcgtgtatgccacggagaagaagcagaccaaggtggaattcccagaggcccgaatctatgaggagacactcaacgtcctactctatgagactccccgcgtccccgacaactccttgttggaggccacaagccgtagccgcagccaggcttcccccagtgaagatgaggagacctttgaactgcgggaccgtgtccgccgcatccacgtcaagcgctacagcacttacgatgaccggcagctcggccaccagtctacccatcgcgactgaccagaccctcagggagtcagggcacgggaggccctatctcccatcctgtggaacccgccccattggccaccccatgctgctgctgcctgggtctctgctctagcacccagaggcatgacaggccctgctcagaggtcagagggtctgggcagaggagggaccacattcccctgccttgcccctgagcacttctggagactgcgtcctgtcctatctgctcaccatcacccttcctgcccgacggagctgcttctgctccctggggcatatggactgacccacctcctgctgagaaccttcccctaggccctgtgcagaagggctactgccccttaggcctcagctgggggaaaggcagttctggtgctgtagaggccctggtgcagaaagtgggacgtcttttttcctaaggtgtttaagcacaggcttgataagtttggtttttaaaaaataatctaggaaatgaataattctaaatctagtaatgaggaaactgagcatttcttttgccctccagggtgccaagaccctacatatgacagaacccttggcccttctccatgcctgtgggatctgtttctttaaagcactttgtactgttattcaggaggttgataatctccttgacccatgtctttctaccctaatccccacttccctgcagaatcaatctgagggaggggataaagaggaagcaataaaaaaaaaacatccgacagagcagctctggctttgccagcctggccagcagctcagagtgcaccgaggagggaaggatggctaagctgggaccggcagtcctcacagggtgcctgtgagaaaggacattttacccccacatcatagtcacatcactgactcctaggtctagcacgactgctctttgtgattctcttgagtacccttggcttccagccatgctgtcctcacatacggtaaagccaaagagctgtcacatgggccagaaacatgagccacggcaggaagaccgtggagcccgtgggcactgcatggtgttggctggcatgcccatcagctgaggacagcaaactcccagcagcccctacagaggtggcacatgcttggccacacatctactccctgcccacaccatctatgctcttggttggtgctggctgggatggcggttctgcccagtggtgtctctgagcgcgggatgacaggagcaaccgaagcaccctgaaggccttcactccttgttgggtaactcagccatggagatgccaagcactagccaggaggtgagttcctctttagggctttggttttcattcctttttgtttggcttggccaaaccagaattcagcttatctgaattattttccaaaggaatgctgtcagggagggactgttctgccagcctaacaaagcaacgtagccacgtatagtacccactttctgctctttggagagaacacaggttatcaagttcatctctcttgactactcttatgatagctgatgccacagagcctatgggcaaatgccagacccagggttagacacaaggacctgaagtgacatgacggcgggacaggggaaatgtgactttctaattaggcattttatgttagtcacagtcttgaatgtataaacagcactaagactctcaggtcaggtaccttggtgatcagctactagttcttccagccctcattgaggtaacaagataaagacaaatccacttctttggccaaattcaggctttggctttatgactttcccacagagactggaatgcgtcagcctgagaccactggcctattttctcagctgccctcttgaggtcctttaacactcaaattcccagctccccactgaggtgttgtgatgcttgccttttgacctccccatcccctttagtccctgcttactactttgacattcacatcctcagtgtctcagtcttttttgccgagaaagcacagtagtctgggactgggcatttatcttctctgactgaaaatctctccttggtcttaaggaaaatactaacattgaactcactgacatgatcttagcttctttaatcagactttgtgacttaaaagtttgggggttttctttgaaagtttccagccctattcagaaagcaactcttggctgtgtgcatttttcaactccaagcagcccaggggtaagtaaacaaagtatggatgaaggtcagattttcttgtcagtttctgagaaacctggcagcctgctgttaacaacacaggccagtattgggttttattgaatttggtatgtgaccaaggtcggcctaaaggatggcgcaggtcctgggcaggaaagaatttttcctttatcacataactgtaatatttggttgctcagcataagtgatggaagcaaacactaatttctaataaaattgtgttaaactc

SEQ ID NO: 178 - DNA, 3545 bp, Homo sapiens
tgaacgcatgcgtgctgtggtcgcctagtaaacggggctgctggtgggccgcgtcgaagacatggaccagggctacggaggctacggggcgtggagtgctggacctgccaacacccagggtgcatatggaactggtgtggccagctggcaaggttatgaaaactacaattactatggcgcccagaacaccagtgtcaccacaggcgcaacctacagctacggcccagcctcgtgggaggccgccaaggccaatgatggcggcctggcggccggggcccctgccatgcacatggcctcttacggcccagagccatgcaccgacaattccgactccctcattgccaagatcaaccagcgtttggacatgatgtccaaggaaggaggcaggggcgggagcggcggcggtggggagggcatacaggaccgggagagctccttccgcttccagccgttcgagtcctatgactccaggccctgcctgccggagcacaacccctaccgccccagctacagctacgactatgagttcgacctggggtccgaccgcaatggcagctttggggggcagtacagtgaatgccgagacccagcccgggagcggggctcccttgatggcttcatgcggggccggggccagggccgcttccaggaccggagcaaccctggcaccttcatgcgcagcgaccccttcgtgccccccgctgcgtcctctgagcccctgtccacgccctggaacgagctgaactacgtgggtggacggggcctgggagggccctcccccagccggccacctccgtccctcttctcccagtccatggctcccgactacggcgtgatgggcatgcagggggcgggcggctatgacagcaccatgccctacggatgtggccgctcgcagcctcggatgcgggatcgggatcggcccaagaggagagggtttgaccgcttcggaccagatggcacgggcaggaaacggaagcagttccaactttacgaggagccagacaccaaactggcccgggttgacagtgaaggagatttctccgaaaatgatgacgcagctggtgacttccgctcaggagatgaagaattcaagggtgaggatgaactctgcgactctgggaggcaaagaggagagaaggaggacgaggacgaggatgtgaagaagagaagggaaaagcaaaggagaagagacaggacgcgggaccgtgcagccgacagaattcagtttgcctgttctgtatgcaagttccgtagctttgatgacgaagagatccagaagcatctgcaaagcaaatttcacaaagagaccctgcggttcataagcaccaagctgcccgacaagaccgtggagttcctccaggaatacattgtaaacagaaataagaaaattgagaagcggcgtcaggaattgatggagaaagaaaccgcaaaaccaaaaccagatcctttcaaagggattggccaggagcacttcttcaagaagatcgaggctgctcactgcctggcctgcgacatgctaattcctgcacagccgcagctcctccagcggcacctgcactccgtggaccacaatcacaaccgcaggttggctgctgaacagttcaagaaaaccagtctccatgtggctaagagtgttttgaacaacagacatatagtgaagatgctggaaaaatacctcaagggtgaggaccctttcaccagtgaaactgttgatccagaaatggaaggagatgacaatttaggaggtgaggataagaaagagacacctgaggaggtggccgcggacgtcttagcagaggtgattacagcagcagtgagggccgtagatggggaaggagcgcccgctccagagagcagcggggagccggctgaggacgaaggccccacggacacagcggaggccggtagtgatcctcaagccgaacagctgctggaagagcaggtgccctgtggaacggcacatgagaagggcgtccccaaggccagaagtgaggctgcagaggctggaaatggcgccgagacaatggcagcagaggcagaaagtgcccaaaccagagttgctcctgccccagctgccgcggatgctgaagtggaacaaactgatgcagagtctaaagacgctgttcccacagaatgatgctcatttccctgttccagggaaggcgttgggatgatggatgcgttggtctttctcccttggtttgtaagcagtacaagggcgtgtgctcccagaatatgctgtaatctaattttggtgaagagacccagcgtttcctcctgagcagtgcctctcacggcttgtctcatgcagtcgtgtggcttcttgcccaggtttcaaagctgaagtacattgtccttagcggctgtaacatgtctcttgacagtagtgcacttggaataataaaggttgggtgattatatcttgatgatacattacttgttcaatacagccactgatggaatgcttccttttttatttttttccttaatttttttttttatttggttgggaacagctgaatactaggaatatatcttgctctatagaggatttttttttgtatgtttcaagcttcagcctttaacctatacctttgtagtgcaccatatggtgtgtgactttcacaggacttcgcagcacctggttcacatgtggcactgaccgcgtcacatccacgcactcccaaaggccagaagtatctgaccgacctacgccactggaaacacacccaccgcaacctcaagaaccagactgtgcagagggcattgcgtcccaatctttagtccttgctgaatcagttctctaatattttacctcatttgtgttccacctctagattacttcaggtttttttcctttaaaattagttactaccactcaaatgtatttacaaagagaatttggccaggcacggtgatgcatacctataatcccagcacttggggaggccgtggtgagaggatagcttaagcccaggagttcaagaccaacctggacaacatagcaagaccccatctcttaaaaaaaaaggaaagaaaacttgatgtgattgccataggtggaataatccaacataaattgccatagatagaaggtatctgtaatatatatatatatataaaatgaaatatatgtttcattttagagaaataactattactttagatctttccaaatctgagaaagggaggctagcatgtgttcaaggttagcacgcaacagaatttcctaaaatcagaagaattggaagatcctccccttttgaaatggccctgctgtgtcagtttccctgtggccttttgaactgtacatctcacatgttgggaaacgctggccactgggaaatcattagaaaggaggctgtagaatatttgccgagcctctactgtataccaggggctaactcaccaagcacattctaggaattgggccctgctcatgaggagccttagtggagattccaggtgaatatttatgaaaaagtcaacattagaactgaaaatggaaataaactgcttgaaaagaaaaaaaaaaaaaaaaa

SEQ ID NO: 179 - DNA, 2461 bp, Homo sapiens
atgctgggtacgctgcgcgccatggagggcgaggacgtggaagacgaccagctgctgcagaagctcagggccagtcgccgccgcttccagaggcgcatgcagcggctgatagagaagtacaaccagcccttcgaggacaccccggtggtgcaaatggccacgctgacctacgagacgccacagggattgagaatttggggtggaagactaataaaggaaagaaacaaaggagagatccaggactcctccatgaagcccgcggacaggacagatggctccgtgcaagctgcagcctggggtcctgagcttccctcgcaccgcacagtcctgggagccgattcaaaaagcggtgaggtcgatgccacgtcagaccaggaagagtcagttgcttgggccttagcacctgcagtgcctcaaagccctttgaaaaatgaattaagaaggaaatacttgacccaagtggatatactgctacaaggtgcagagtattttgagtgtgcaggtaacagagctggaagggatgtacgtgtgactccgctgccttcactggcctcacctgccgtgcctgcccccggatactgcagtcgtatctccggaaagagtcctggtgacccagcgaaaccagcttcatctcccagagaatgggatcctttgcatccttcctccacagacatggccttagtacctagaaatgacagcctctccctacaagagaccagtagcagcagcttcttaagcagccagccctttgaagatgatgacatttgcaatgtgaccatcagtgacctgtacgcagggatgctgcactccatgagccggctgttgagcacaaagccatcaagcatcatctccaccaaaacgttcatcatgcaaaactggaactgcaggaggaggcacagatataagagcaggatgaacaaaacatattgcaaaggagccagacgttctcagaggagctccaaggagaacttcataccctgctctgagcctgtgaaagggacaggggcattaagagattgcaagaacgtattagatgtttcttgccgtaagacaggtttaaaattggaaaaagcttttcttgaagtcaacagaccccaaatccataagttagatccaagttggaaggagcgcaaagtgacaccctcgaagtattcttccttgatttacttcgactccagtgcaacatataatcttgatgaggaaaatagatttaggacattaaaatggttaatttctcctgtaaaaatagtttccagaccaacaatacgacagggccatggagagaaccgtcagagggagattgaaatccgatttgatcagcttcatcgggaatattgcctgagtcccaggaaccagcctcgccggatgtgcctcccggactcctgggccatgaacatgtacagagggggtcctgcgagtcctggtggccttcagggcttagaaacccgcaggctgagtttaccttccagcaaagcaaaagcaaaaagtttaagtgaggcttttgaaaacctaggcaaaagatctctggaagcaggtaggtgcctgcccaagagcgattcatcttcatcacttccaaagaccaaccccacacacagcgcaactcgcccgcagcagacatctgaccttcacgttcagggaaatagttctggaatatttagaaagtcagtgtcacccagcaaaactctttcagtcccagataaagaagtgccaggccacggaaggaatcgttacgatgaaattaaagaagaatttgacaagcttcatcaaaagtattgcctcaaatctcctgggcagatgacagtgcctttatgtattggagtgtctacagataaagcaagtatggaagttcgatatcaaacagaaggcttcttaggaaaattaaatccagaccctcacttccagggtttccagaagttgccatcatcacccctggggtgcagaaaaagtctactgggctcaactgcaattgaggctccttcatctacatgtgttgctcgtgccatcacgagggatggcacgagggaccatcagttccctgcaaaaagacccaggctatcagaaccccagggctccggacgccagggcaattccctgggtgcctcagatggggtggacaacaccgtcagaccgggagaccagggcagctcttcacagcccaactcagaagagagaggagagaacacgtcttacaggatggaagagaaaagtgatttcatgctagaaaaattggaaactaaaagtgtgtagctaggttatttcggagtgttatttatcttcccacttgctctctgtttgtatttttgttttgtttttgattcttgagactgtgaggacttggttgacttctctgcccttaaagtaaatattagtgaaattggttccatcagagataacctcgagttcttggtgtagaaattatgtgaataaagttgctcaattagaaaaaaaaaaaaaaaaaaaa

SEQ ID NO: 180 - DNA, 2214 bp, Homo sapiens
gccagccgttcacgcgttcggtcctccttggctgactcaccgccctcgccgccgcaccatggacgcccccaggcaggtggtcaactttgggcctggtcccgccaagctgccgcactcagtgttgttagagatacaaaaggaattattagactacaaaggagttggcattagtgttcttgaaatgagtcacaggtcatcagattttgccaagattattaacaatacagagaatcttgtgcgggaattgctagctgttccagacaactataaggtgatttttctgcaaggaggtgggtgcggccagttcagtgctgtccccttaaacctcattggcttgaaagcaggaaggtgtgcggactatgtggtgacaggagcttggtcagctaaggccgcagaagaagccaagaagtttgggactataaatatcgttcaccctaaacttgggagttatacaaaaattccagatccaagcacctggaacctcaacccagatgcctcctacgtgtattattgcgcaaatgagacggtgcatggtgtggagtttgactttatacccgatgtcaagggagcagtactggtttgtgacatgtcctcaaacttcctgtccaagccagtggatgtttccaagtttggtgtgatttttgctggtgcccagaagaatgttggctctgctggggtcaccgtggtgattgtccgtgatgacctgctggggtttgccctccgagagtgcccctcggtcctggaatacaaggtgcaggctggaaacagctccttgtacaacacgcctccatgtttcagcatctacgtcatgggcttggttctggagtggattaaaaacaatggaggtgccgcggccatggagaagcttagctccatcaaatctcaaacaatttatgagattattgataattctcaaggattctacgtttgtccagtggagccccaaaatagaagcaagatgaatattccattccgcattggcaatgccaaaggagatgatgctttagaaaaaagatttcttgataaagctcttgaactcaatatgttgtccttgaaagggcataggtctgtgggaggcatccgggcctctctgtataatgctgtcacaattgaagacgttcagaagctggccgccttcatgaaaaaatttttggagatgcatcagctatgaacacatcctaaccaggatatactctgttcttgaacaacatacaaagtttaaagtaacttggggatggctacaaaaagttaacacagtatttttctcaaatgaacatgtttattgcagattcttcttttttgaaagaacaacagcaaaacatccacaactctgtaaagctggtgggacctaatgtcaccttaattctgacttgaactggaagcattttaagaaatcttgttgcttttctaacaaattcccgcgtattttgcctttgctgctactttttctagttagatttcaaacttgcctgtggacttaataatgcaagttgcgattaattatttctggagtcatgggaacacacagcacagagggtaggggggccctctaggtgctgaatctacacatctgtggggtctcctgggttcagcggctgttgattcaaggtcaacattgaccattggaggagtggtttaagagtgccaggcgaagggcaaactgtagatcgatctttatgctgttattacaggagaagtgacatactttatatatgtttatattagcaaggtctgtttttaataccatatactttatatttctatacatttatatttctaataatacagttatcactgatatatgtagacacttttagaatttattaaatccttgaccttgtgcattatagcattccattagcaagagttgtaccccctccccagtcttcgccttcctctttttaagctgttttatgaaaaagacctagaagttcttgattcatttttaccattctttccataggtagaagagaaagttgattggttggttgtttttcaattatgccattaaactaaacatttctgttaaattaccctatcctttgttctctactgttttctttgtaatgtatgactacgagagtgatactttgctgaaaagtctttcccctattgtttatctattgtcagtattttatgttgaatatgtaaagaacattaaagtcctaaaccatcaaaaaaaaaaaaaaaaaaaaaaaaaaaaaaaaaaaaaaa

SEQ ID NO: 181 - DNA, 3625 bp, Homo sapiens
ccgctcgccgtccttgcaggctctgccgtcggaaagccgctcattctcgcttccccttccctttcccggctcaagtccttcctctctctttcctttctttccgcctatcttttttctgctgccgctccgggtccgggccattttccgggccgggcgcactaaggtgcgcggccccggggcccagtatatgacccgccgtcctgctatccttcgcttcccccgccccatgtggctgcggggccgcggcggcgctgcccactatggcccggaaagtagttagcaggaagcggaaagcgcccgcctcgccgggagctgggagcgacgctcagggcccgcagtttggctgggatcactcgcttcacaaaaggaaaagacttcctcctgtgaagagatccttagtatactacttgaagaaccgggaagtcaggctacagaatgaaaccagctactctcgagtgttgcatggttatgcagcacagcaacttcccagtctcctgaaggagagagagtttcaccttgggacccttaataaagtgtttgcatctcagtggttgaatcataggcaagtggtgtgtggcacaaaatgcaacacgctatttgtcgtagatgtccagacaagccagatcaccaagatccccattctgaaagaccaggagcctggaggtgtgacccagcagggctgtggtatccatgccatcgagctgaatccttctagaacactgctagccactggaggagacaaccccaacagtcttgccatctatcgactacctacgctggatcctgtgtgtgtaggagatgatggacacaaggactggatcttttccatcgcatggatcagcgacactatggcagtgtctggctcacgtgatggttctatgggactctgggaggtgacagatgatgttttgaccaaaagtgatgcgagacacaatgtgtcacgggtccctgtgtatgcacacatcactcacaaggccttaaaggacatccccaaagaagacacaaaccctgacaactgcaaggttcgggctctggccttcaacaacaagaacaaggaactgggagcagtgtctctggatggctactttcatctctggaaggctgaaaatacactatctaagctcctctccaccaaactgccatattgccgtgagaatgtgtgtctggcttatggtagtgaatggtcagtttatgcagtgggctcccaagctcatgtctccttcttggatccacggcagccatcatacaacgtcaagtctgtctgttccagggagcgaggcagtggaatccggtcagtgagtttctacgagcacatcatcactgtgggaacagggcagggctccctgctgttctatgacatccgagctcagagatttctggaagagaggctctcagcttgttatgggtccaagcccagactagcaggggagaatctgaaactaaccactggcaaaggctggctgaatcatgatgaaacctggaggaattacttttcagacattgacttcttccccaatgctgtttacacccactgctacgactcgtctggaacgaaactctttgtggcaggaggtcccctcccttcagggctccatggaaactatgctgggctctggagttaatgacaactccccaaatgcagagatttacactaacttccattctcagtttccttgtttcttttgattttttttttcctaattgtgtgaggctcttgtgttttagtgggaacaccaaagtttgcctatagtttaggcacttaataggaagaagctctgtacagaaatctgaaagttgttttgctttttgttttcccctttggtaatcaaaattttactatcttttattatttctggcttttcaaccaaacattgttgctaatccctatttttctttaagtgacacacattctcctgtctctggcttcttcaggctgaaatgacatagtctttctcacccttacttcactcttgagaggtagggctcctttataattacatggttgctctcagactttctgtgaaagtttgggagctgtgtgtgtctgtgtgtgtgtgagagagagatcttgtctgcgtgtgtgtgtgtgatcttgtgtgcctgtaggtactgtgtgtcactgaaattacctggagtgaggattacttgtaattaaaatatttataaaagaaacaactttattcacagagtccagctttgggactagtctgtatcttgttttttaagtctaacaacactgataataggaagtaaaaacagaaaggaaaagaaattaccactgggaaaatctttttagttagattgtaggcttcctggggcctcccatgccaggactgcaaagtgatccagccctacctgtcttcccacctgtgtgtcccccgtgtgggaagttggtgtcacttccccttcccaccctcacatctgcttagccagtagccacacccctaaaacatcagactcaccatccaggtgcagctccagaggctacaaaaggcttcatgggacttgaatccccatcctagcttctctctccttcccctcaagacctgatctggttttaaggggcctggagctgggagtctcaagtctgctaagattcacatccatagcccccatggctttgaggagaatcctctctgccattcttccaatctccccagtgggttttgctattattttctaaattgggttaagtctaagaaggtgggggtgagcagggggtttatctgtgtgtagtgagtgcttcatgtgtggaatattcattttcttactgcagtgggacttggggttgaagccacccctcctactctgttggcttagccctgagatggtgacaggctggcctgcagtcagcatcattgtgcatgtgacagcatcaatgtgattagtaatttgtctgttcctcccttgaactgtctgtttagtctgaggtttttaaacttgcaggcagctgactgtgatgtccacttgttccctgatttttacacatcatgtcaaagataacagctgttcccacccaccagttcctctaagcacatactctgcttttctgtcaacatcccattttggggaaaggaaaagtcatatttattcctgcaccccagttttttaacttgttctcccagttgtccccctcttctctgggtgtaagaagggaaattggaaaaaaaattatatatatattctccttttaatggtggggggctactggagaggagagacagcaagtccaccctaacttgttacacagcacataccacaggttctggaattctcatcttcgaacctagagaaataggtgctataaacagggaattaagcaaaatgctggatgctatagatcttttaattgtcttaattttttttctattattaaactacaggctgtagatttcttagttctcacagaacttctatcattttaaactgacttgtatatttaaaaaaaaaatcttcagtaggatgttttgtactattgctagaccctcttctgtaatgggtaatgcgtttgattgtttgagattttctgtttttaaaaatgtagcacttgactttttgccaaggaaaaaaataaaaattattccagtgcaaaaaaaaaaaaaaaaaaaaaaaaaaaaaaaaaaaa

SEQ ID NO: 182 - DNA, 3081 bp, Homo sapiens; identical to SEQ ID NO: 172

SEQ ID NO: 183 - DNA, 3780 bp, Homo sapiens
ccgcggggcgttgtccggagagctgcgaggccggggttcccagggttcacgccacactctaggaagtgcctgagctagtgagctggccaacgagctccgcgggctgggaccatgggctgcttcttctccaagagacggaaggctgacaaggagtcgcggcccgagaacgaggaggagcggccaaagcagtacagctgggatcagcgcgagaaggttgatccaaaagactacatgttcagtggactgaaggatgaaacagtaggtcgcttacctgggacggtagcaggacaacagtttctcattcaagactgtgagaactgtaacatctatatttttgatcactctgctacagttaccattgatgactgtactaactgcataatttttctgggacccgtgaaaggcagcgtgtttttccggaattgcagagattgcaagtgcacattagcctgccaacaatttcgtgtgcgagattgtagaaagctggaagtctttttgtgttgtgccactcaacccatcattgagtcttcctcaaatatcaaatttggatgttttcaatggtactatcctgaattagctttccagttcaaagatgcagggctaagtatcttcaacaatacatggagtaacattcatgactttacacctgtgtcaggagaactcaactggagccttcttccagaagatgctgtggttcaggactatgttcctatacctactaccgaagagctcaaagctgttcgtgtttccacagaagccaatagaagcattgttccaatatcccggggtcagagacagaagagcagcgatgaatcatgcttagtggtattatttgctggtgattacactattgcaaatgccagaaaactaattgatgagatggttggtaaaggctttttcctagttcagacaaaggaagtgtccatgaaagctgaggatgctcaaagggtttttcgggaaaaagcacctgacttccttcctcttctgaacaaaggtcctgttattgccttggagtttaatggggatggtgctgtagaagtatgtcaacttattgtaaacgagatattcaatgggaccaagatgtttgtatctgaaagcaaggagacggcatctggagatgtagacagcttctacaactttgctgatatacagatgggaatatgaagtgcaatgtggaaccaggacttggtattaagcctttcccaacttgtgaatatagaatttgataatacacttttgtgtattagcaatggtttttactaatgctaaaacttttaaagtttattttttaataaattgttgagtattacatcatttacttgaggttcaaaaataattcattttaaattaagtagttttaatcagcttaaaagctatttaacccattttaataagcttgcagttttgtttctctgcatatgatattcttattagaaaacagaagtagctaaaagtttattattttaatcctatttaaatgttctttcaaatctctaataatttaaactttcctcagtgctccatgatactttttttgagactccatatcattgcttattttacctttttcaatttagagggatttgttactagtcgatcaattagaatgaacctatgcacatttttatgtacacatatccagttatataattgcttcctagttgcattatatggcaaatgagattttgtacatggagttgacataatactttgtaaattgaattttttaaagaaataggcatttgataaccagcttggcaagtaactctactaacagatgttggtatagctatttaaagactacttcgtaagtagtatgattatttgaataaattacacattgtttagttttttaatacaactgctatatgactcttctgcttcctgataagaaaaggtatatgcaatgctaaaactgtagaagcccaatcaccagcagtttttaaaaaggtgataacttttattagctcttgtgggctatcaagagaattagaacaaaaccttgtgacttttaggtaagaaataggcatgatgataagctatgcagattattaaaaagcttgatacatttgatttttcattagatatgccattcatatcaagtaatgttcaagtatgataaaattattttggttgctttaaagcactgtttcccaaatctacctgatcataataatttaccaggaagcagaggagagctacttgtttaaaaatccacattcttggacccaatcctcagatgcacggattcagtcttcaggggaaactctgttttaaggggtatgttgtaatctaaagtaattggttcaggaggtgtcaataggttgaacttgtgagaaggcactgaatctgccatccacatcacatatagcagctattatgaaatcagctttcataggcctatttttaaaaggaatctgaaatttaattctattttgataaaactaagactgaaaataaccacttgtaaacattcctatgattgttactaaaatgtattttcatgtttaaaatgtttttggatatttttgggttaataactactacattgaattgcatgttaaggtgcagaaataatacattaaaagattttcactttaaattaattagtaatattgagcgctcaccctgtgcgtggccttgtgctaaccattagcactgcatcatttcaattcttttataagggcattcaatactacaaaatcaacatgatttcataaggtgcaaataaaagttggtgacagatttaatataattttgatcacaatttacaaatgatctttgcaaatagtggtcagacggcattagtttttcccttagttaagctaaattaaagggactccatcctgttatgattatattattattattattattattatttttgaggtggagtttcactcttgttgcccaagctggagtgcaatggcgcgatctcggctcaccacaacatccgcctcctgggttcaagcgattctcctgcctcagcctcctgagtagctgggaatacaggcatgcgccactacacctggctaatttttgtatttttagttgagatggggtttttccacgttggtcaggctggtctcgaactcctgacctcaggtgatccgtccacctcagcctcccaaagagctgggattacaggtgtgagctaccgcgcctggccatgatgatattattaaacaccattattcacatttcaaataataacaatactttttgtttttcaaaaataaaatgcaatgttatataaagctataaactaagttctttatgatatttgagcaacaactcaggaatataacatataagggagatgttaatttaaaaatttccactacacttattatctattaaccaaagcttaaaattttgtattcttctgttagataagaccttttacccatttaatttgtctttaaggacagtcatttggcttctgaatgtttgaaacgattttaaaaaataagtagtgctatggttgtttctataattctaacctttgatagtaatcagaatgtattacatttcatttctgaatagcttttgaatttatgaaaaattattaacaatgaaaaattggtaattttattaagttatatgtgtttaaatattatattagcttatttctcttgcattaatagtactgctgtttttgttttgcttctttatatttatgtctagcttttatatgtaatttatctagtgtttataaaatgtgatttgtaataaatgttgttaaaatgaaaaaaaaaaaaaaaaaaaaaaaaaaaaaaa

SEQ ID NO: 184 - DNA, 4317 bp, Homo sapiens
agcgggtatctatggccgggctcaggcggctgctggggagccaggagaccgcgcgggacggcggatgaggcgcggcggctgcggcccagggcacctcccctctggcttcccgaacccggccaggtccgacccgagggggaggatggaaacacctgccgcgctctgagccccccagaagagaacacccttcccgccatatcaccccacggtcctgcggaggccaccgcctggtccccccaagtctccatcgcgcagcgtggggccgagaggaatagtgagcgatggcggaaaacctgaaaagactggtctcaaacgaaactttacgaacgttgcaggaaaagctagacttctggctgaaggagtacaacacaaacacgtgtgatcaaaatctaaaccattgccttgaactcattgagcaagttgccaaggtgcagggacaactctttgggatcctcacagcagcagcccaagaaggaggacgtaatgatggtgtggaaacaatcaagtcacgccttttgccttggctggaggcttcctttactgctgcttccctgggaaaatctgttgacagcaaggtcccctctctgcaggacacgtttgatagggagagacataaagatcccagtcctcgggatcgggatatgcaacagttagactctaatttgaactcaacccggagtcaatgcaaccaggttcaagacgatctggttgaaactgaaaagaatcttgaagaaagcaagaacagatcggccatatcccttttggctgcagaggaggaaataaatcagctgaaaaagcagcttaaatctcttcaagctcaggaggatgcccgccacagaaacacagatcagaggagctcagagaataggcggtcagagccttggagcttggaggagcggaagcgtgagcagtggaactcactcaagcagaatgcagaccagcaggacacagaagccatgtccgattataagaaacagctccgaaacctgaaggaggagatagctgttctgtctgctgagaaaagtgcactccaaggaaggtcctccaggagccggtctcccagccctgcccctcgcagccgtagctgcagccgcagcagatctgccagcccctccaccgctgtcaaggtcaggagaccgtccccaaaccgctccaagctgtccaatgtggcgcgcaaggctgccctcttgtcccggttcagcgattcctattcccaggcccgcctggacgcgcagtgcctgctgcggcgctgcatcgacaaggctgagaccgttcagcggatcatctacatcgccacagtggaggcattccatgtagcaaaaatggcattcagacacttcaagatccatgtgagaaaatcgttgacaccatcttatgtggggtcgaatgactttgagaatgctgtcttggattatgtcatttgtcatcttgatctatatgattctcaaagcagtgtcaatgatgtgatccgagccatgaatgtcaatcccaagatttcattccctcctgtcgttgacttttgccttctcagtgacttcatccaggagatatgttgcattgcctttgcaatgcaggccttagaaccacccctagatattgcatatggagcagatggagaagtttttaatgattgcaaataccgccgcagctacgactcggatttcactgctcccttagtcctctatcacgtgtggcctgctctcatggagaatgactgtgtcattatgaagggagaagctgtcaccaggagaggggctttttggaattcggtgcgatctgtaagtcgttgtcgaagcaggagtttaagtcccatttgcccccgtagccaaattggtttaaacacgatgtctcgaagtcggagtccttctccaataagatgtggattgccaagattttaaaagcaccagacctgctcctttgacccagtgcgtggaaacagctgctttctccagtgccgccatctgtcttctgtgtctgcctcagacctcacttaagataatgtcaaaaggcaattctgtgtatcaccccacacagagagttaaatgttttggcttggcgcatttgtaactttagatatattgcattctattttattttatagatactaattccattaatttcataaaaatgattgtataggcatttaggatcatattcattcgaagcaaagtccgttacaaaggttcaagatttccatctcaaaacactacgctcttttatgggaactgtgtgaactgaagtggaaagcatctaccatgctgaggctaaaagaaaagatgaatcattttagtttgcagatggatcgtaaatataattgttggtatcagctttagctcaaaaccaatattaggtgttttaatttccttttaaggtttggaagacagccctaatctcaggttggggagctcatgttagtagcagtgacttaaggctaagtgtagaagataatttaagatacattttctttatatattagccaacaaattatatttattggttggcttgcttttccgttctgattttgagagtgcccagtttggtttagttgaccaatgaatgtcaaagctacttagttgagagaatttccttgttcataaatgtagagcagtgatttgattagaagccagctttgagataaatgttaattacctcatgcatatctcctgggaatatttcaaactgttttaatgcatgtgttatatataaaagtttcttgggacatgctcttcacctgttctacctagttatttgcaaattcagacctcctattgaactctgtctgaccaaaactacttaaactcaaggcccaaaactaggggcaccatttactgattttaaattgagtatatatcccttgacttcttcactgtcaaatacttttgaaacttcacgttcaagataagaatggaatgttgctttcttgcaataagtaatgttctttctgcctttttttcacttttaagtcagccttaaacacatgcctcacaaacatctactttctccacatacctttgagagagacactgaattggcctcagctcagttttgcataagcttagtgccagaaccagcacctgatgcttttcaggtgaaaataaaacaaacagcttctctaaagcatcttacccctgtgctggaggtttgagggacctcttcagtgcctgccccttgagtctaatggtcaccacctcattctgaagtatgagttgaattttttgccctctttgcatatttacattagtcatcactttgaagcaatgcagtgtgctggaaggagcactatctgcctaggtaactgctagtcatgacctggtcatcagcttgctttgtggcactgagcaagttacttcacttctctgagccttggttttatcatagggtgaggaggttggatacaattagtgccccccttaaccctgcagactcaatgttcccttttataacaagtattttattctgaatatgaaatgaaaattaaagttaatataatcatctatgtgcatgtataattttaagcagtgaacatagtaccctaactataatataaagcagaaaaaaaggcaacttttaataaaataaaatgtatttcaataaaaaagcttgggtataaccaccctagaagataaaattaagtcattagatggctgaacctgcatgtagagccaccagctacaaatgaaaatcaatgtgtgtattggcaacagaaaatcacggtgttgtcattggatgtgactttctgaagtggtgggcaattcttgttaatgttttaaacaaaaaaaaaaacaccttacagtcttgccctgatttacacagcagtcacattcctggaaaattcaagtgtttattaaaactatgcaacagttactgtgtgttatacgttgaaaggtcttcactaatatctcactaagtaatgagaatgcctacatatcagaattttttttttcaggagccaagcacatatactgatttggaaaaaggcacaggtagctcagtttatttgctttctaccctgcctggccacttgctgtttcttcagtttctaatttgagctgtaactacacaaggaaagctaaatagtctggaaaatttttggaaagaatccacaaagccaaaggagactggcctatactcattttatctggggatgtaccttacccttagagactttgaaaaatgtgaagctcttattttgtaacctgggtaaatgttagtttctagattttcggcttaacatctaataataacatttaaaaagtgcttttgtaactattagttatttgcaataaaatgctttccttctacaaaaaaaaaaaaaaa

SEQ ID NO: 185 - DNA, 4259 bp, Homo sapiens
actcgtctggcaccagcccgggccgcgcccgggacctcatttcggacctcggtttccctttgcgtggggctcgcagctgccaccgcttccccgcggagcatggggctgcctcgccgggcaggggacgcggcggagctgcgcaagagcctgaagccgctgctggagaagcgccggcgcgcgcgcatcaaccagagcctgagccagcttaaggggctcatcctgccgctgctgggccgggagaactccaactgctcgaagctagagaaggcagacgtcctggaaatgaccgtgcgcttcctgcaggagctgcctgcgtcctcatggcccacggcagcgcccctgccttgcgacagctaccgcgagggctacagcgcctgtgtggcgcgcctggcccgcgtgctgcccgcctgccgtgtcctggagcccgccgtgagcgcgcgcctgctggagcacctgtggcggagagcggccagcgccaccctggacggcgggcgcgctggggattccagtggcccgtctgcccccgccccagcgcccgcgtctgccccagagcccgcatccgctccggtgccctcgccgccctcgcctccctgcggccctggcctctggcggccgtggtagcccctcggccgatccacagaccctgccgactgcttgggaccttggggcactggacaggttgaagctcttggtggcggctgctgttcccatcattaggggccagcccagtacccacacccaggccggaagccggctgtttgtgactggcgtggcagactgaaagccctggggctggggctcggctcagggaataaaaggagcgtccctgcttcacccccaacttggctggagaagaaaggacaagaggcagcagggtgaagaagaagccccccatcccagctggtggagatagttctggaactggaccccgcagctgcgtgggcagccgacacacccaccccagcactggcaccagaccagagccagagccaggacctgggcaaagtgcagccgtgcaccctgcctggtcactgctctcccagccctgcctgggcctacctcctgcccagctctgcttgggaccctctgggcatgcagcagcagtagcctaagggctctggtcacttccagggctctacagggcagcagagcagagcaaaagggtgcatatgctgggagctgtcacctccactcctaggcttttctgcctagagcagaattataggggcagtatacatccaggggtctgtgcggtggggctgggggattccttaagtgactttgggaaggatttgttttcccgagcatcaatttcacacctgggcattgcaccccaggctatgcagtctttcagtgtgaggaaggggcagaacaagaatgaggcggccccgtggcctcaaggaagcttgtggctttggaggatctgactccagcagagtctgtgccaatgtggggtgagcagggcccctgccatggagcagcaggaatttgagggatggagcaggttaaagaatgggaaacatcttcacttgtttttttttcttgcaaactactccctgctactcattgagactggttactggaagcaacttgttaagatttttctttctgggcgggcgcggtggctcacgcctgtaatcccagcactttgggaggccaaggcgggtggatcacctgaggtcaggagttcgagaccagcttagccaatatggtgaaaccccgtctctactaaaaatacaaaaattagccgggtgtggtggcatgtgccagctactcgggaggctgaggcaagagaatcacttgaacctcggaggctgaagttgcagtgagccaagattgagccattgctctccagcctgggtgacacagcaagactctgtctcaaaaaaaattttttatttctttcttttccatggaggcctagagtccctgtgaaggctaggaaggggctgctgatcccaggagtgcccacgaggagtggggggcactgttggcccataatcaggcaaacacccatcatttcatgggggattcatgaaatcatagtcaggcaaacacccgtcatttcatggctaagcatttgcagaaggtggaggattctcccccgagtccccaaatcagcagcctgtgctagggaccagagcaccgggggcaagaagacagaaccaatgtgggagtggggatggtcactaaatctgactgtgccacacaagcccatgatgaccttggcactggtttgggtggcaggatatgaaggaagctgtaggcattattgaaaaaatcattgttcagccaacagggtgaggctcccagcaaggccgtgccatcttcccacctccctgtgcccagagggttagactgtaagctcccggagggcgaggctggggctgagcgtgcctccacgtccccaaggcacagggtgcacagtgggtgctcactgaatatattggactagtgagcagaggatgagaggactaccctgtaatgagccttggacagtctggcatttgccttaactcccactcccatgccctgggatcactgttggatatttactccatgaggacaaatactggggaggtgtggagaggagggagggcaggttcctcttactttcacccattgctgagaatgagcgcctgttggcactgcctttgtgagcctccgggagcagttaacctgcggcccaagcccgcctaggactccacatcaggcaggcacaggactggccccttgtcctcataaaaactctcagtacagcttaaactctgtaagatctaaccagccaggaggaccctcgcttcctctccgccatgcttgccacctcttgcttctgagagtccatctcagttcgcagttctgtgacttgcattgacctggctccaatcaagctacaactcaagcagtcacggggagaaggattgtagatgggccagtgactcacagggtcaggcactcgggggagcctgagtcaggaggtcagtgggccctggaagggagggggcaagcctgggtgggtaaggttctgggccccaggcaggaaggcagagtttctccgcaggggtgtgtgcaagagctagctgcgcagaaggtctccgctggctctccaagccgggcttgtgaaataggaacgccaacatcctcctccacaggcagtggcaggcacctcctcctcaggtgccccccaagccctatctgatgggcaaaggtgaacgcagggcggtgggcttttcctgtgcagagggagactgattcaaagggtcatttatgacctttcacaagtcccacatcctgcccaatggccaggtcttgggatgctgttgcaagatggttctgtgactccatgtgactgtctgatgattgccccagctggggaaaaggctcccatgtctctttctcataaaaccagtgggcaaggccgggcgcagtggctcacgtctgtaatgccagcacttcgggagaccaaggtgggcggatcacctgaggtcaggagttcaagaccagcctgaccaacatggtgaaaccccgtctctacaaaaatatggaaattagctgggcatgacggcgggtgcctgtaaccccagctacttgggaggctgaggagggataatcagttgaacccaggaggtggaggttgcagtgagccgagatcgcgccactgcactccagcctgggtgacagagcaagactccatctcaaaaacaaacaaacaaaaaactagcgggtgaaatgattcagtgacctaaggacagccagagcactaagctgctgggaacccatctgtgctgaaatgtagatttcccaggaaactcaggcttgggacaggcgcctacctgctcctcgggcaccaggtgattaggagaggtcgaatctcatttccacgtgagtgaggataaagactgggctgccaaggaggactcctcataaacattgacaaattgctctgccccgcctgtgatcccagacgactcctgcagtctgggatcctgagtgtcctgtgggttcatctcggatgggcgctgcataaacagcctgcagggaacgtctgggagaaccagcttcacaacagatataataaggaagaagtttgaaatattgcaagaattgcgaaagtgtgacacacagatacaaagtgggcacatgctcgtgggaaaatgttgccaatagacttgcttgactctggagttaccccgaaccttcaatttgtttaaaaaaaaaaaaaaggcaatatcttgacgtgcaataaagtgaactgcaat

SEQ ID NO: 186 - DNA, 2550 bp, Homo sapiens
gctcggcgtcgcctcccccgaccgccccctccagggcccctcctccgtgccgcggccaggctgcccggccggcggcgcgctggaaatatgaagagacgctgcagctgcggtggcggtggcggccactgcagctcagagcggcgcacgcggcggccggggcgggacgcggggccgggcgcggagaagtcggggcgggcggcagagaggccgggacccggcctggcccggccgcacccggccggaggcggagggcagagcgcgcgcccagttgcccgggcaccaaatcggagcgcggcgtgcgggagggcccagagcaggactggaaatgtcctggccgcgccgcctcctgctcagatacctgttcccggccctcctgcttcacgggctgggagagggttctgccctccttcatccagacagcaggtctcatcctaggtccttagagaaaagtgcctggagggcttttaaggagtcacagtgccatcacatgctcaaacatctccacaatggtgcaaggatcacagtgcagatgccacctacaatcgagggccactgggtctccacaggctgtgaagtaaggtcaggcccagagttcatcacaaggtcctacagattctaccacaataacaccttcaaggcctaccaattttattatggcagcaaccggtgcacaaatcccacttatactctcatcatccggggcaagatccgcctccgccaggcctcctggatcatccgagggggcacggaagccgactaccagctgcacaacgtccaggtgatctgccacacagaggcggtggccgagaagctcggccagcaggtgaaccgcacatgcccgggcttcctcgcagacgggggtccctgggtgcaggacgtggcctatgacctctggcgagaggagaacggctgtgagtgcaccaaggccgtgaactttgccatgcatgaacttcagctcatccgggtggagaagcagtaccttcaccacaacctcgaccacctggtcgaggagctcttccttggtgacattcacactgatgccacccagaggatgttctaccggccctccagttaccagccccctctgcagaatgccaagaaccacgaccatgcctgcatcgcctgtcggatcatctatcggtcagacgagcaccaccctcccatcctgcccccaaaggcagacctgaccatcggcctgcacggggagtgggtgagccagcgctgtgaggtgcgccccgaagtcctcttcctcacccgccacttcatcttccatgacaacaacaacacctgggagggccactactaccactactcagacccggtgtgcaagcaccccaccttctccatctacgcccggggccgctacagccgcggcgtcctctcgtccagggtcatgggaggcaccgagttcgtgttcaaagtgaatcacatgaaggtcacccccatggatgcggccacagcctcactgctcaacgtcttcaacgggaatgagtgcggggccgagggctcctggcaggtgggcatccagcaggatgtgacccacaccaatggctgcgtggccctgggcatcaaactacctcacacggagtacgagatcttcaaaatggaacaggatgcccgggggcgctatctgctgttcaacggtcagaggcccagcgacgggtccagcccagacaggccagagaagagagccacgtcctaccagatgcccttggtccagtgtgcctcctcttcgccgagggcagaggacctcgcagaagacagtggaagcagcctgtatggccgggcccctgggaggcacacctggtccctgctgctggctgcacttgcctgccttgtccctctgctgcattggaacatccgcagatagaagttttagaaagttctatttttccaaaccaggattccttactattgacagatttgctttaccaaaagaaaagacatttattcttttgatgcacttgaatgccagagaactgtccttctttttctcctctccctccctcccagcccctgagtcatgaacagcaaggagtgtttgaagtttctgctttgaactccgtccagcctgatccctggcctgagcaacttcacaacagtaattgcactttaagacagcctagagttctggacgagcgtgtttggtagcagggatgaaagctagggcctcttatttttttctcttaattattattatatttctgagttaaacttagaagaaacaactatcaagctacaacttttcctgccattttcctgtggttgcagcctgtcttcctttgaaattgttttactctctgagttttatatgctggaatccaatgcagagttggtttgggactgtgatcaagacaccttttattaataaagaagagacacaggtgtagatatgtatatacaaaaagatgtacggtctggccaaaccaccttcccagcctttatgcaaaaaaaggggagaatcaaagctttcatttcagaaatgttgcgtggaaaagtatctgtaattaaagtttcgaagtaatttaacctaaaaaaaaaaaaaaaaaa

SEQ ID NO: 187 - DNA, 1272 bp, Homo sapiens
ggccgggcggcccaggggctgccgcgggactcggggcgcagccgagtggctgcaggggtggagtgggccggacgagccgcggggcccgggtgccgcgggttcgaggccgggccccgcgcgaggaggccgcgccaccccgggggagctgcccggcagcgagtttgccccgctgccgaaagaaggcgggagccggcaggggccttcgaaaccccctggcaacccaggcccggagtccttggggagcggctgtttcctgggacgccctcccggacacccccgctgcagggttacggttctgggcccccggcagaaggctcctccgggtgacccccggcggggccctgcgagccgcgggagccgaccccggggcctcgagccgggaggaagggggcttccggaggcggagggccgggggccgagggagccgggcctctcggacgcggggcagggcagcgcccgggctggagacggactctgggaccctcggctgcgggggtctcagcgacctgccccgcggcaagcgcggccgcggagtggcctaccggggaccctcccccagagggaccggcccggggcggggagatgaacggcttcagcacggaggaggacagccgcgaagggccccccgccgccccagctgccgccgccccgggctacggccagagctgctgcctcatcgaggacggcgagcgctgcgtccggcccgcgggcaacgcctccttcagcaagagggtccagaagagcatctcgcagaagaaactcaagctggacatcgacaagagcgtaaggcacctatatatctgtgattttcacaaaaatttcatccagagtgtccgaaataaaaggaagaggaagacaagtgacgatggcggagattctcccgagcacgacactgacattcctgaggttgatctgttccagctgcaggtgaacaccctacgacgttataaacgacactacaagttgcagaccagaccaggcttcaataaggcccagttagcagaaactgtgagtcgacacttcaggaacatacctgtgaatgaaaaagagacccttgcctacttcatctacatggtgaagagtaacaagagtagactggaccagaaatcggagggtggcaagcagcttgagtgaggatgaagcacatcttaaaggaatgaagtgtaatgcttgatgcacaggtgatatctactacatttaagcccataaagactgttaaatattattgtaaataaaaaagtttgaatgatgaaaaaaaaaaaaaaaaaaaaa

SEQ ID NO: 188 - DNA, 10624 bp, Homo sapiens
ggggggacgaggcaggggaagaacctgggaaggaaaaccagtagcatcagcagcagcagtagcagcggcggtggcggctaaggcagctcgaacagctgcggcgacggcgacagcccagccttgactgcgaccgcgctagctacagcgcctgctgcctgagcccgccagcgacgtgcgcctcgggagtcggcctgtgaggttggacagcatttggacttggaatgaaacaataagaggttatattcatggataaccaacaagataaggctattgttgcctcagccaacggagaaaacactctgattaatggggtcaaagaaaatgactcagaggaccaggatgtggcaatgaagtcatttgcagctctagaagctgctgcacctatccagcctacaccggtggcacaaaaagagaccctgatgtatcccagaggtctcctgcctctaccctctaagaagccctgtatgcagagcccgccctctcctttgggcctgattgaagcacccgaacatgctgctaatagtgcttctgtgaatgccatctccctcacatctggcattgcaaaaggcctgaacacatggtcacttcccaatgaatgtgagaaagctccatttgccataatggagcctgcaggcatgtcagctctgaatggggactgtctcatgcagccaagtcggacttgcttaggctgcttcatggaatccaaggatgcagtagatcctgagccagggatcagtctgaaagttggtgatctaaatagggattatgaaacgtgtgcagtctctgatatagggattcagtgtattaatgctggagaaaatatgaaatatggagagcagctgctctcagaccagctcctaggcttccccctgcataagtcaagggcaggagacagacgagaaactgagaaacctgacattgacttggaggatccggctcagaaaagctattatgaggcattactgttagacaagtgcaatacagaagaagctttgcttgcaaattccaatcaggattggggttacttcgagacttttattagtgaaagtaagattgaactgcttgacctctgttccaaaaatgagctgtctgtcaacctattctctgaagaagatgtggataactacatgtttgatgatgatgaatcaacactaggcagtgatgtctgctccctgaaaattcgatatgaatcctttcaggacaatgttcgagacaagactactcttttgatgcaggaagatgcccaattcaacttttttcccagcgtctttactacctgccccaagcgagagtctaagagtggggccctgaagcagagcagtgatttttcccaattcaaggtccctgatgtgagcatcatctggggggaggaagataaaaacttggacaagaagaaaggcaaagaggaaggacaggaagacaaaggtgtagagaagaaagatggaaaggataatggagaaaagcctgccttaaataaaccatgcagtgggactgaagtagagcaacttaagaatccaaagcagggccatcttgctaattccctggagacatcagggagtttcagtgatgatagttccttcattgagatctcatatgatgctatgggtgagatcaaggactgtagtcgctatatggctcgggacactaattctggcagctcctcctcccaacagaactatgggctgcgagccaagagaaaagtcagatacagtgaagattatctatatgatgttgactcactagagggtgaaaaagtaaatgagaggaaggaatggctgccagttggttccaaagaggaagatgatgatgaatggtgtcccaaaaagagaagaaaagtaacccgtaaggagccccctgttattatcaaatatatcatcattaatcgctttaaaggtgagaagaacatgctggtgaagttgggtaaggtggatgccagtgagacaacagtgaatttgagtgagaatcagctcaacaaatatgccaagctggcacccttgaaaggcttctggcaaaagaagaagaagcagagaaacaccaacacggactccatcaagacacctttttcccaaaagcaaagctttgaaccaggtagctttgaggtgtcatttctgccacctgctcgcaaacgaaaatctaaacttggcaacaggcacaggattcaaagaatcccatccattgaaatttcagcaagtagtaaacagatttcattatgtaatgatcagaggcacgctagtaatcataaagaagatggaggcctaaaaggtacactgaagtcagcacctctgggtgctcctagctgtgcaaatggatcacatttaaatgacatcacaggccctgactcagtgaaagtcaaagcccaagacacagagtttaaggggccagagaggaaagtgctcaataaaatcaaatttaaaagtgaagctaggttaaaatctaagaaagtcaaagctgctgggcaagaaagcaagccaattgttcaaatgagccctctcttggaaaaccaatcctcaaaggctaatttaaagaatgaagttattcctgggacatcaaacagttcccgtctatctgaatttcatgaggcaaaggctgctaagagttccacttttctaccaacgacatgctcttctgaaatgcctttatcatctgctaatgttaccactaatatacctgttatcccgggagggtatctgcagacattgttagatgcttctgacttgtcaaataacactagtatctcatacttcagccaccattctccagagcaaaatgaaggcagcctcactcaaaccgaaaaatcatttgtacccctccagcctacccaggactgtgtgctcacctcatcctctgactctgagctgcagcagtcatctcataacttcaaaatggaatcaagcaactatagaaatgtgtggcccaacaaggctacttctggcacccaggaattcatggctgaagtctcaagggagatagccccaacccaatccagtgaatttggagcctcccaagtagtctccatggaaaataacctcacacctacaacatacaatccaatctgtctcaatagtggtggcagtaattgcaacaaggtcctgtatgactccatgcaagatacccaactcccatctgatgactcttaccaattatgtcactttaataatggagagatctgctttcctttccagcaggggccagtcaatatggatgatggtcggctctttagctttgattcaatggccccactctctgtcagctcaagtaattattgctccttaagcttgaagtcctgtgaaaaggatggcgatgatgatatcactgatgacttcctggcccattgcagccctaagctggtgatccagcaaagcattgatgagatagcaccactaaaggagtccactgacctcctggatatatccaacttcacccctgacaaattccgccactcttccctttcagagatgtccccaccggacacccctagtctttcccctcaaattaccagatgtgagagtatgaagacactaggaacactaaaggggttccaagagggtgtcccaggaccattggacagtgtggaaaaaatcaagtgggactgcagtaccctttcacggcaggtccaaatggaggatggatttactttaaataatcaccagtttcagttccatatgttcaatgatgaggattctgtcagcctgctccaaaaaaacccttgcctgtcaacatttaatgatccatctggtcaaattagtaccaacaacaaagtgtcaaaatcaagaaagaaaagttcacccagcaagagtggggctatgaaccaaagctcttctcagaaaaacaccaggaaaaaatccctcaaaggtaacaacaaggggattgaaaaaccacctggcaaaaactcccgccaggtccctaagtccacaaagaaagggaaatacatggctgccatcaatggagagaaaatgcaaattggcattggccgtgggggaagccaaaccaacaccatatcctccactgggaagacattggctgaatgtatccaacatggtggccctatggcctctatgaagatgccaagtcaaaagggactttctggagattgggccttggggaaggagagcagcccaggctggagtgatatgagcatgggcaccaacaccaacagccttctggatgatgaccaacgggaatttcaggagccttcctatatcttgtccaacattgcctctggtatggcagatgtgcagagattcatgatggcctccatagagcccctttgggaacccatggagcaccatggggatcccaacatattctactcccctgagtccaatagtctaaaattaaaaaccctcaaaatattggctgggacaccacaggagtctaagaaaaagatcaacagtgggtcccaaggagccactaagaatcacaggtcaatcaagggtgtgagcaaaagcaatgggaaaacagcaataggtgatcctggtcgtgcaaacatgcctggttataacgaggactctcgctctaccttctttgataaaaagtatagtaacatgagcactttaggcaataacggaccgacacacaaaaagttgtatcgtcacaaatccagctccaaggccctgagagatgagaaatgtaagggaaagcacatggagcgagaacaggtccacaaggatgagtctgggacagcttcttttgaaaaactgagggattccgactacaatctcctaaaagcagaaacaaccttttgggttttacctgtgtttgaagaagagactcgcattttccagaaagacatttgatgtttgtgttttatttctttcaaaatatgccttgtggtatgtatgttgacatgtaagtgcttaaagaaaagaattttaaattgtgggaatacgtctttggagcaaactttaatctcatgttctatgtaaaagacttaaaaagtcatacagttgcacaagtagtttatgcactatttacccacaaggaaaaaattgaaaacattgtgccaaactacaaacaagtgactgtactgtatatatttttacttctatatcaacatttggttgtatttggggaagttgtccctgttaatttactagaaacattccagtgattcttgctattaaccacccccacttatgtggatagcacctgtagatcatggtggaaaaatatgttgtgttacacaatttaccaaaattaaaggatactgtttgaaatgtgccaaattttcttacctcatctcacagattcacccacagtttaaagctcattaattatttttaaatggatatatacacacccaaacatatatatgtatatgtttgtgtgtgtgtgtgtgtgtgtatatatatgtatatatatatatacacacacacacgttcttttaaagttttagactctactgtcttgtgtggaaacatgaacagctaaacaaggcaaaataaagattttcttgttccattgtgtaagggttaaaattttggaaaagtctgaaggccacaacagctaagtccatcagggacccaagtatatgcatttacagaacgttttacaaggaaacaaaacagctgctttcaaagtttgttttctaaaagcaaaatctgtagctgaaaattatttaaagtgcaaagttatattgctgatactttatatctcagttttatatattttataatagtctgggataaattataaaaatagctataaaatcaacactaatgataaatgaagtatatagaatgcttttatttaaatagtttcctaaatgttttattccagttttgtcaaaagtgcactcatatcatggctttagtgttctttcagtgtttaatcttgcaatgccaatgtcatttaaagaaaatgttaaggcatcccagttcaaccaaatttttcttcttatgagtaaagtacatttactatcagataagatgaacaatttgtggcaacaactgatttgggccatatacccttagtctgaggataaccaatatttgatgccacacactaaacttaaatctcaattttaagtacaaatttttaaatcacattttttattcagtactccccctactttttaaaaaaaatttcacagccccaacattcctcactactactttttcttcccttttattcaccacttgacttctaacatttgatctcttttctttgcacaattgaaggcctgtgcatctgatgactgatgcattatggcacagatgagataatggatgtgagagcgctttgtagatcataaagtgctatacagatataggggattaatattattaatattgttagttgttgtcgttgttactattcttattaatattgttactaacctattaacttgtgaatatataggctggggtgggagggtggagaataagtgggaagggaaaaaggggatttaacaaaaaaagggaagatgtttcaaaaggaaaattttaagcaaaatatgaacctacctagtcaatgccacctaaatgtattcacaaacagagaagcaacatttgaaagtagtcagagagaaatggaaggaagcctgtcatgtatataagtatatacacttcccggtccatgattcctttcaccagcctgctctattccttacagctgggtcgtaaaatgaacaagcctgtgttcttgatcatgtgtgttcccagcgtcagtctcttgtgtctgtggggatgagtgggtgaggagcattctgtgaggctggtacaggcccattcctaggctttaatgctctgtttgcagtgagccctggaaaattacttagtggaaaggcaccagatgaaacatgtctcctgccccatagctaccattcaaaagggaaaataaccaaactggaaaaccttcttctatttctctattctgatagctagctgtactaaatgctatggccagtccctagaaactggtctttgttttgtttttgtttttgtttttgatttttctgttttgcagctgaattttggcttggaatcaccaactctgcctgtattgtgatccccaagactccagacctcagagtcacctgctggcttagaggagtggagtgctttctatgtaatgaaaaggtggcaattaatgaaaaaataaagaaaatgttccattaatacaatgtgtttttataaaagtaaatatgggagcagttgtcccagttttttttcggtatcagttcagctttggagaatggggtgtgagtggggtaggacagcctgaaactgttggaaacaatttccttgtgagaacttgctatcataagtcctttggaatggatattctttcagttgctcctatggagcccattaagggccaattctagggcatagttcatccctttctccaaagagaattgttattttaaagtacctttttaattggcctgcagtgtattatatgtttttaatatataaattagtgacgcataaccagtcactttgtactgaaacataaaaagaaacagagtttgagaaatgagcaataggccgaggcagaagatgtttattctcttaattgcatttaatattcctctcagtacattgtgttctgagatgttcatcatttagcattttgttggtcctgtctctgctctcacagttctttttcttcctgtcataaccagctgccttagtagagtataaaaatagtgttttgccctatcactggtatctcaagtcagaaatatatattatccttggtctgaaattcctgattaccgctcccttctaaccttccccctctgagaagctgtttcctattaatgcctccctaacagagtcccatttaatctttactttcctggaaatggtaacctcccttattcttcttacttaatctcagaccttggtcttagaatttttcttttatggtctcatatcccacctgcccaaattgtcagggctcaacaatcttaggctgctttcttctggaagttcagaaggaaaccttcccattcttaattgcctttaattgctttggctattttcaaatctaattttttaattaaattttttttaatttttatagagtaggggtacaaggacagttgtgttacatggatatattgcttagtgttgaaatctgggcttttagtgtacccatcaccgaaatagtgtacattgtacccaataggtggtatttcatccctcaaatataattttaaacacacactcgtgcccacatggacaaattatatcacatgactgaggaaacttagaaattccttttccctgaagatctgttaagaataggtctcatctcctgccctggttaggtgctatattatatggagaagggtattgagactttgggggtcatgtttgggctgtgataactggcttgaaccagtgaccatcctttctgcctcgccaaggtctcttataccagcttcttcacatatgctgcttcctcccagctttcccttctgacttcttgttactctgcaactatgtgtcaaggccttaccttttcctgatgttttcaaacctcctgcattactttgatcatcacttcttcagccatctcactgaagtccttggtgctagctgggcttttgtgacaactttcaccttctctgaactttttccttgctgggaagcatctgcgtgtgtgagggggctacggagggaagtgtgtgtgtgtgtaagagagaggcaaaaggatgcttcaaaagctataaacaactctagcaagcatcctaagtcctatgtgaggttttgcagttctagtgaatttctgttttagtaggtttcaattagcatttactgcctaaaggagaaaaaccatatccaaggaccttttagccatgcttgctattaccaagctggaccagtgtgatgtagatccaacatgtcttcagcttacagatgctctcagaacagttccaagaattgaagagagctaagtttttatgctgaagaggagaatggagcactagctagtcctaactattgctagaaatagaaatgtttattttctcctttattattgagaaattatctaatttaaggagtaaccattttcatttagggatttttttaatgactgcccatcactacagaaatatgttctttttataaaataaaactaatgtgaggttggtttgttttctaatcataaaattcactaagcctatagttacatttagaagatttagtaccaaaatcaaacttttagtaacaaacaggaatcttgtcaacacaatgtaggccagggattttgtaaaggtttctcaaagacccaaataagggagaaaaaaattttagttgggctgtttaacttgggaaacactgtcatcagcttgagggtcctcagccagcatgtgattattttgatgacaggactcaggctaccctttaaggcacattttttactcagcattaaacactagctacagtcgtgaagcagagctcccattgcagctacatacttgagatgtactcttggtttcagaatcgtaactaagaggtaaggcattggagaaggacaatgtaaaagacagaggtttagaacaaagtttatggtgtgaatgaggctttcaaaatcagtatctgggtaaattgatactaaagacactgaagaaacactcatccacataagatggaaaggatgtctgtccatctaacaagctcaggggtttctgagtctcagaatgacatcccatttcaaaaagaagaaaagagatattgaaatcattctgcctgtttgagagatgactggttatttacagcacaaaaaaaggcttagaatgaaaactagaagaggccttttgtttttcactcccagtgaggagagtagaaatcttaagatgctctactgggctacctgtagcactgactggagtttgctgcctacagagttttgaatgtactagtccttagtttccatagaactgaatgcacctctttagtaagttgctgatttatggtgctaaagaaaatgattattcccatttttttcttcttccccaagccccttaagcatttaagaaaatttaaaataaaagcgttagaggccctttttatgaatgtaacctaagtttctgtttgacatatgacactgcaacttaaaaatgttaggaaattatttgcctttttttttcttttagagttaagctttataaataatctgtagaatcaattgaagtttaaagcttaaggatcactcttaagacgtctacaaaatcttgtatatttttaagtgtgccaatttgtaacatattttgtaagtgtatatttttcttagaaaagtgctgtgaagtgtctgtatgtgagagttttcctttttctgcaccactaggtgctaataaaaggatatttacttcaaagtttctggttttagaaaccacaatacaaagaaaaaaaatacacttttgttggaaattttgtaacacaaaacatgttgtgaaagagtgtagtgatcttgtgcaaaaaaaatgaacatttgtgagcttcttgctgttttatagattttcttgtaaattattcttgtaacacttctggttttgttgttcttgttgcgaaggtttcaaatatttgtgactgaatgtacggtgaaactgtcataatgttacctagctgagttttgttattgtttatgaaataaataaaaagaaaagttt

SEQ ID NO: 189 - DNA, 1878 bp, Homo sapiens
cacggattttatagcatttttatataattgaggattgtcagaattggaaagggccctggagatcactagtactaccctcctcaccttcacagataggtaaattggagcccaggaaccgagatgatcacacagccaggtagggacagtacaagaactagaatgaaaatcctagctcctgactcagtgttctttgcacgatgccacactgcttcccaattcgctggtcagttattaaaatttgtcaggcctgccgaaggattgacatgctgggcaatgcaggccaccacggtggatctgtgactcctgaaggtggcaaagccctgcacactgccttgggatgagcacactgagctctgcagggcctcagctggaaggcgccatccaatcgtccttcccctccccagcagaactccagaggtggggcggctgccgcagggcccaaggctgcctcggcagggggctttgtgctttttgttgtggaggccaccagggattcaggaagatcctgaatgggttgtcaattgactgaaaagtaaattcccagtgagtttgaacctccacggtttttgagacagtattaaaagcttgagaacggagattatggatggcaccaggctgggcactgccattcttttactttccttcatgcattttttcggatccagagtattaacaccactttttttactctgcccattcaaaaacagtaggcaaattgggggaaccaatttataatcactcaagcccactgccaaagttcggataagccagggcagaggggttagattcccccccctccgtaggcagagagaggcctcaggagagtggacatctttactgagacagccccaaacacaccagtggctctcaaagtgtgtccctgagaccagcagcatcaccttaggaatctgctagaaataaaaattcttgggccataccccagggttactgaatcagaaacttggttggggcctagcagtgttttcatgagccctccattgatcttgatgcagctgaagtgccgggcaccagtgaaagggaagggctgcggtagtgattccattgattcctgctttgatggaagttatggcctcacaggttagacgttgcaagttgagttggccctcttgcctaggtgtgcctccttgccttgggattctgacatgaacaggtgaagtctcttcatgattttttttgttgttgttgttaatggtatgcttgctattatggccaatatgtaaatgttactctgaatacatatttatataccatgttacttagtgacattattcaaacatttgtatgcgtatttgtgaaattgtttgcatcagtcatttaaaaaatatttcagcctaagttttctaagaggtatgttgaatacatttttaaaagccagcttaagggtcacagcagccttagtttaggagaagagctaatcacaggtgaccactcaagttctttcaatgaagacctgatgatgtatttagttcccattttccacggtgattgactcaatttaagtgtattgtggctatatgtaatttacaggctgctttgcgttgcaggtgggaaaatctcccaggctggtgtgaggctgaactggggtaaaagaccccctgacccctcctcattcttctaaggtcaccacctcttagagggtctcttattttctttcagagatcaaatgcacagttatgctgtacaactaaattctgcagtcttgggaatccttacgagtaccaactattagtcactttttaaagtccccaaagtggagtgaggatagggggagtggaagcagtgtttggttcttactttacccaaactgtgtataaagaataaagttagcagaatgatgccaaaaaaaaaaaaaaaaaa

SEQ ID NO: 190 - DNA, 2546 bp, Homo sapiens
cgctttagcagcagccgctgctgccgccgccgggggagaggcagcctattgtctttctccgcggcgaaggtgaggagctgtctcggctcggcccgcgggggagccccgggagccgcacggagatggaggaggacatctggacagtgagcaggaggcgcttcggcccatgccgaacatcccaggggacctggagagccaggaggccatggtggcatttttcaactccgctggagccagtgcccaggaggagcaaagggtgtgctgccagcccctggctcacccagtggcctcgtcccagaaaaagccagaggtagcggccccagccccagagagtgggggtgagtctgtgtttggggagacccaccgggccctgcagggggccatggagaagctgcaggaaagtacatcagccagggggcagtgtcagagacgcagcactgggagaggaggacatcgtcaggctggcccaggaccaggaggagatgaaggtgaacctgcaggagctgcggggcaggtgttgcagcttgtgggagaccacaaggaggggcatggcaaattctgaccattgcccagaaccctgctgatgagcccactctaggagccccaatagcccaggagcttgggtgtgctgacgagcagggtggtgagtagagccctcaggcggggtgggcaggcaggagcaggggaggctcacactgtgctcagattcccaccccccctccctctctctgaagatctttgtgaggtgagcctcactgatagcgtggaggctgcaccaggagaggacagggagggttctccccacgacaaccccactgcacagcagatccagcagctgcttcctgtaatgcaggactccccaggagcacccaggcatgggcagcaacccctgcatgccattctttttgggctcccgagaacagggagataaacaccaccatcatctgagagccgggaaggggaaggcgtaggtgtgggcgtggcaaggttcctggaaaagaggggctggaagggaaaggggaggaagatggagggagaagctagagcttcataggtagtgcctgggggctgtggcggtcctccccaccccacacacactggcctctctcatggcacccaggcagtccacccacagttcagaccaatgctcaactcccccggcttccctcttctgtggtcaccccatcttccaacccactggcccagggccacctcttgcttggggagccccacccaacagccaccaagcctgacagaaggaacactgcttgaaccaaaatggtgaagctgtaagggatggctggctggagtgagcgccagaggcccctctctgggcagtcagaaagcccagggtccactgaagggaccctggggaaggcagggagggcaggtagctagatgccactgcccatagacttataagtctaagaggggaacctcaactggttggcggggggctgcaggttgcataggtgaggctgggcccttcctgctgggaaaagcagaagagggagactccgtggcaggaaaggcaggtgggctcgctaggcggagctcagctgggccagcaagcactgtggtctccttggctgaatagcacaggtgacccctaggagcaacaggccaaggtccgtgagcctgctggctggcagtagtgcttcagtagtgctggccagggacccagccttcagtcacatgctagcagctgtgatggtacctgggagggagggaagggggctgtgtgtccttgcatggcctatgaagtgtgttgtgggataaccgtgtgtataggactctcaggcttttatcctagatcaccactggattgctgacagatagaggacgtgggaccgtgactatcacccctaatctgcagtggatttggctctcggcactcccaggctgggagctggatacctgccctggcagcatgactcagactgcatgacagtcacagactcgcctctgctcctgtggtccagtggccggacaccccctgggatggctcaaaggagtcaggacttggaagtggggacatcagggtagctgaaggaaatccacacacccagagcatctcggagttcagactctcagacctgaagtaggcgcccccgggactgggctaggagttggacggaatggaggatggaggacagcgagaagaaaggaagagaaatgcaaagtgtgggcagccgccaagagtgaaaatagagggaagtgtcatgcaagtgctggacagaaggcggcaggtgggacgagccccacagccccctcctcaaaaacgaccacctccaggactcagtgatccctggggggcaggctctgccagccctggctgccttgctgggcccttctgggactgtgcgctggacttggagccccttggagtatggcttttcacacgggcttctataccgcttcgactggaagatccacctccccactgccttttctcactcagatggggacaccgaggtccagaggaaaagacacctgtcaaatgtcacagatctgggaggggacttaagacttatcatgccaagagg

SEQ ID NO: 191 - DNA, 11527 bp, Homo sapiens
cgggggaccccacttgtgtgcagcctagacgctggttcagggagtcgtacatggaagccttgcggaaccccatgcccctgggcagctctgaggaggccctcggggacctggcctgcagctccctgactggagccagcagggacctggggactggggcagtagccagtgggacccaggaggaaacctctggcccccggggagacccccaacagaccccaagtctagagaaggagaggcacacacccagccggacaggtccaggagctgcagggcggactcttcccaggagatctcggtcctgggaaagggcacccagaagctccagaggggcccaggctgcagcctgccacacctcccaccactcagcaggctccaggcctgggggccacctaggaggacaagctgtggggaccccaaactgtgtcccagtagagggtcccggctgcaccaaagaggaagacgttcttgcatcctcagcctgtgtcagcacagacggcggcagcctccattgccacaaccccagcgggccttccgatgtgcctgcccggcagccacaccccgagcaagaagggtggccacccggcacaggagacttccccagccaggtgcccaagcaggtgctggacgtcagtcaggagctgctgcagtccggggtcgtcaccctcccagggacccgagaccgtcatggcagagcagtggtgcaggtccgcaccaggagcctgctctggaccagggaacactcgtcctgtgctgagctgacccgcctgctgctgtacttccatagcatccccaggaaagaggtccgggacctggggctggttgtcctggtggatgcacgcaggagtccagctgcccctgccgtctcccaggccctctcaggattgcagaacaacacatctcctataattcatagtatcttgctgttggtagataaagaatctgcatttaggcctgacaaggatgcaataattcagtgtgaggtcgtgagctccctgaaggccgtgcacaaatttgttgacagctgccagctgaccgcagacctcgacggctcctttccctacagccatggtgactggatctgcttccgtcagaggctggaacacttcgctgcaaactgtgaagaagccatcattttcctacagaattcattctgctccctgaacacccacagaaccccaagaacagcccaggaagtcgccgagttaattgaccagcatgagacgatgatgaagcttgtcctggaagacccactgcttgtgtctctcaggctggaggggggcaccgtcctggcgcggctgaggagagaagagcttggcacagaagacagccgggacaccctggaggccgccacaagcctgtacgaccgagtggatgaggaggtgcacaggctggtcctcacctcgaacaatcgtctccagcagctggagcacctccgggagctggcgtcactcctggaagggaatgaccagcaatcctgccagaaaggactacagctggcgaaggagaacccgcaacgtacagaggaaatggtccaggatttcagaaggggcctgagcgccgtggtcagccaggctgagtgcagggagggagagctggccaggtggacccgctcgtccgagttgtgcgagacggtgagcagctggatggggcccctggacccggaggcttgtccctcctcacccgtggctgagtgtttgaggagctgtcaccaggaggctacctcggtggctgcagaggccttccccggggcaggtgtggcagtgctgaagcctcatgccctggggaaaccgtgggcatcacagcaagacctgtggctgcagtacccccagacccggctccgtctggaagaggccctttctgaggctgccccagaccccagcttaccgccccttgcccagagccccccaaagcatgagcgtgcccaggaggccatgaggaggcaccagaagccaccctcattccccagcacggacagtgggggtggtgcctgggaacctgcccaaccactgtccggcctccctggacgagcgcttctgtgtggacaggacggggagcccctgggcccagggctgtgtgctctgtgggacccactgtccctcctcaggggccttccaggggcaggggccaccacggcccacctggaggacagctctgcctgttcctctgagcccacccagaccctggccagccgccccaggaaacatccccagaagaaaatgataaagaaaacgcaaagtttcgagatacctcagcccgacagtggccccagggactcctgccagccagaccatactagtgtcttcagcaagggcctggaggtaaccagcactgtagccacagagaagaagctcccgctgtggcagcatgccaggagccccccggtcactcagagccggagtctgtcctccccctcggggctccaccctgctgaggaggatgggaggcagcaggtgggcagcagccgactgaggcacatcatggccgagatgatcgccacagagagggagtacattcggtgcttaggatacgtcattgacaactattttccagaaatggaaagaatggacttgccccagggccttcgagggaagcaccacgttattttcggcaacttggagaagctccacgacttccaccagcagcacttcctccgggagctggagcgctgccagcactgccccttggccgtgggccgcagtttcctgagacacgaagagcagtttgggatgtacgtgatctacagcaaaaacaagccgcagtcggatgccctgctcagcagccatggcaacgccttcttcaaggacaagcagcgggagctaggtgacaaaatggacctggcctcctacctgctgcggcccgtgcagcgtgtggccaagtacgcgctgctactccaggacctgctcaaggaggccagctgtggcctggcccaggggcaggagctgggcgagctccgagccgccgaggtcgtggtctgcttccagctgcgtcacggcaatgacctgctggccatggacgccatccgcggctgtgacgtgaatttgaaggaacaggggcagctgagatgccgggatgagtttatcgtttgctgcgggaggaagaagtatctgaggcatgtgttcctctttgaagacctcatcctgtttagcaagacccagaaggtggagggcagccacgacgtctacctgtacaagcagtccttcaagacggccgagatcgggatgacagagaacgtcggggacagtggcttgaggtttgagatttggtttcgcaggcggcagaaatctcaggacacctacattctccaagcaagctcggcagaggtcaagagtgcatggaccgatgtcatagggaggatcctgtggcggcaggcactaaagagcagagaactcagaatccaagaaatggcatccatggggataggcaaccagccattcatggatgtcaagcccagagaccggacccctgactgtgcagtgataagcgacggggctcccaaatgtgcagtgatgagcgaccgggtccccgacagcatcgtcaagggcacagagtcacaaatgagagggtccacagcggtgtcctcctctgaccacgccgcccccttcaagcgaccacactccaccatctcagacagcagcacctcctcttctagcagccagtcctcctccatcctggggtcgctgggcctgcttgtgtcctccagcccagcccacccgggcctatggagccctgcccacagcccctggtcatctgatatcagagcctgcgtcgaggaagatgagccagagccagaactagagacgggcacccaggctgcagtgtgtgagggggctcctgctgtgctgctgagccgcacacgccaggcctgatgactgtcagggtggcagtgcccatcatgtggctagaacaatacagagggagcagcacgccaggcctgatgactctgggggtggcggtgcccatcgcgtggctggaacgatccagagggaatagcacagcaggtgtccaggtatttcccaggattttagacattccctaacattttcaaacaaatttataattttgtcttatttaaaaaacaaaccttccacttccacccaagacaacagcataggaaacagacctaaaacaagacaaaaaaagactaaacatgaaacaaaagatgtcaagacacaagacatttggcaacaaaggaccgcgatccctgagagacaggaaaacgggaggtgagcccggtgatggcctcagacctccctccgccttgagagtttgcaggcctcagtgcagggaggggcccaggaagagcccagcagcctccgtgagttgaagagaccaagtcagcaggagttggcaggtcagagtgccagagagagatgcctgcatggggaaagactcaccagatcagcccctccagcacctagtgggttgctacccattcgcacactcaaacagggaggctaccaaggctgggagcaacctttgaaaagaccaaagatcaattcctggtactcatgtgggctggggacaggacccgttcccaccagccagactagggaaactctcagtagatcaattcctgatactcatgtgggctggggacaggacccactcccaccagccagactaggaaaactcccaatctgtgagcattaggtggagttctcagaaaatcttgcctcaggaatggggataattagccctagactgagccctgctcctgactcgcctacaaaatcataaaagcaagacctaaaatgatcaaaccattcccagataattcactttatcccagaacaaagctccagatgatctaggggttaccaaagtgtccgcaccctgcaaggtaaactcacagtgcctgacctcggagtgccaggcgtgcagaggagcagccaagggcaaacactccaaggagagtcgcctggcaaagccaaccacccagagccggcgtctgtgctagaatcacagaattcaaactgtggctgaaatcgcagcccaggcgtccagaaagttaaagttaagaacctataatcccagcactttgggaggccgaggcaggcggatcacgaggtcaggagatcaagaccatcctggctaacatggtgaaaccccgcctactaaaaatacaaaaaattagccgggcatggtgttggccgcctgtagtcccagctacttgggaggctgaggcaggagaatggcatgaacccgggaggcggagtttgcagtgagctgagatcacgccactgcactccagcctgggcgacagagcaagactctgtctcacaaaaaaggttaagaaatgacttaatggaagagattcagaagacccagaccgaccttacagggatgagaaactacaatattgacagtggaaactatcctggatggggtaacagattggatttcacagaagagaccatgaggcaccttgaagacacatcagtggaaactatttgcatttgttgggcctccagagagacagaaccaataggagatagctagatatatatacagacagacagatagatagatagatagatagatagatagatagatagactgacagacagatgagaggggccttaggggcattggctgacacaattttggcaggtcaagagccccacaataggccatccacaagctggagacccaaggaagctgctagtgtgcccagtccgagtcctaaagcctcagagccagggaagccagtggtgtaattctcagaggccaaaggcctgagaacctggaggccactggtataagtctgagtccatagacccagtgaactccaaacacaagagatatgagtgcacatcataatcaaattgcatataaccagtgataaacagaaaatcctaaaaccagtcagaggacaagggcatgttctgttgggaggcacaaagctgatgaggatggctgactcctcaggagcagcatgggtgagaggcagtggaatgtactaaggagaaaactgccaaattcacattctgtacctgacaaaatctttccgaagcgatggtgacataaagacattttcatacacacagaaactaagagtttcatccccagcagacctgcactacaagaaatgttaaatgatgtgcttcagggaagagaaaaatgaagagcatgtgcaccatccaggattttcctcgttatttgaatccctttggcccatctcccatttgccccaaggaatgagtgctggcagtgagctgcactttttttttctctaaacgggaaatgggttaaaagatgagtggcttggccgggtgcggtggctcatgtctctaatcccagcactttgggaggctgaggccagaggatcacttgagcccaggaactggggggtcatgctgggaaacatggcaagaccgcatctctattaaaaataaataaaagttaactgactgtttaaacaaaagtattaacgtatctgcggtttgtactatacgcacaggtaaactgtgtgaccacagcagcgtgatggctgggagatgctggatgtgatacgtgaagtgaggggtatcacttgaaggtagattgtggtaagctaaagatgtacttataaacccttgaaacacccactaacaaagaattacagctaatagaccaacagaggagataaaatggaatttttaaaaatccagtccaaaaatacgtagagaaagagggaaagggaagaatggacttgggggcgacacagaagacaagtggagagagactgaagcagccactggccatcacagcaaacacaagcagggcgcaggacgccagcaagccacagacaggcctgctctctgaattggtgaccacatgagtaacttcacgggtctgttctatgtccagagttgtcaaactgcatgctttaaagatgtgcagtggatcgtatgtcgcttaaatctcaacaaagcagtattttttttaagtacaatcatgcacacagcacttcccctgggaggcaggggctgtgcccacagaagtcgttacctctgcgtcctgagtatggacagccaccatcacacagccccagaggccgcccaggctctagccacactctggcactgcctgggacaggtgccctcaggaacccaaatgccactgcccccgtgaaagccacttcaagcgtgttgcttcaaatcagaaggcatctacgcctgtggaagaggaggctgctgggggcccaggtgtgcagggggcagggccaggtgcaggggcacagcttatgcctgtggccaacccactggggagcaaggctggggatatgcccaggccagcagggccagcaggagtgactgcgccatcctgaacacgtccttgggcctcccaggaccttggtgcctcccatctgggctggcacaagcctccagtcaaaagatgggtctctctctcctgatagcatggagcctggatgtgggaatggagccacaccagccccacgggagccccacgacccatcgggctgtgggatgcatccccacggccgggacccctcagcctgcgacttggtctgggcagatgcaaaggccaccctgcagggctgaggtgtctgtggggaaggaggtgcccagccctgggaggccatcttgctcctgctttttatttaacccatggggctctttggcctcattttctgttttttgagtttctcgtgcactccaaactgtcctggagccagccctggtgtgaaacagaggcttcctgctggcagaagaggcccaccgagttacgtccacaccagctggccctgggcacctctctctctggccttctgtccacactgggatttggctctgatttccagaaggcagggttaggaaacacctgtttccaggcagagtaatgcttctgtctgaatcaggcctcatgggcttcaccagcagacacgaaggtttcatttagatggcgaacacgtgttctcatttctccagggttctggacccgtgagctgaagcaggtgctgagaagtgggagaggcggccactgggtccctcagggtcactcaccccgccacgtgaggccacttccgcccagcagtgggggcgctgggagctgaggggcccacaggggacgtgggagacagccccgatgcgtccccatccgcagtgacgctagcgcggagtcgtcgccaagcacgtggagggacagccctggagccctggcctggcccagcatctcccagagtcacttcctgatgcctccccagccctgcccaggaagggtttgtggccacagccccacagcggccccctcgcctcgaccaccagtgcctccttccaagctgcctgagcaatcctgggtggtgagctccaccactcccacccacgcctcagcactgggaccccccagggatggtgtggggattcctgccccccgtccatgcctcagcactgggagctgggaaggtgtgtgatttcctcccccacctcagtactgggacccccaggaagggtgtgtggccccaccatcctgaatgctcagggctggtggtcagcgaggtggtttctaaaccaagccctgggaggagccatcctgggactgtgcttggacaaggttggggctcccgcagtgagctctagccctccccaggaccctcccacggccccagggtgccggccttcagactgaccccattcgtggatgagtctacaaggctccccagtgcccagcaagagtgtttttacattcagaggtgaggaaggggtgccagcatctgccccagacacaaccgggcaggtacagatgtcatccccttgaggacagcagggaggcgactcaggagaggctgatcagacgggagccgcatccccatcaccttccagagagacctcttcttttgccaggtgtcgtgagggctgtggcttagctgggcctgcgtccatccccggttctggggagatgcccgggcccctcctggatggcagcagcagtggaggtttgggttttgagggagccctaagaacctgagagacttagatggagcatggcacgccctggagagtccacgtccccagacccctcatgccaacaccattccacccagcagtttcttccctgtggtcagaacaaaacccccaagcctcaggcctcaggctggttttctgacaggcaaaatgctccttatataaggaaagacctttccttggctgaccctaaagtagccaaggggagctcacatcgcctggcctgccgccaccaccaggctgcctgaccagctcaccgccttgttctagatgcttctgaagcaacagctcgcctggccccacccccatcaagcatctgctgggcagcctcactccccggcccgcctgtagctcccaaaggtctcaagcctcaacatcctggtaaccaagtgcacccagagggctggcagggtcacatggaggcaggggacccttggccccagggtggtcgtcttcccaggaggtccgcctgtcaggtcagagggcagcaggaggccaccccacctccccgggttccctcgagcattcctttgtcaggagcagctcccccaggatccaggcatccctggcccccctttgcccccgccctgctctcaggagccccctgccaggtgctctgaccacaggaaacaggagccctcagggccactgccagaggacggattctgctgccaaccagaggtcctggggctggcggcgctggtgtgcctgccctgggccttcagcagcccccataaggagaaagctccagcctcccgttcagacaaggctccgtcctggggacacgcctctcccaaggtcacccacgtgggggctttgttactcatgcttcccagactgcgtgctgtgtcagagttttcacacctgcctgatgtcctgggggggctcacagaggaccgaccctgcagggagatgctgacccaccctgagacccaggagaagaaaacggccagggtccaggctgctcccaccatccctgggggattagcaccttggctgagcccgaactgaccacctggggcgtaggtccaagatttaattacaaaacgataggtgaatgtgggttctgtgtgcctgtgacatagagaatgttttccacaccgcgtgtgaaatgacgagagcttttgtgtcacacatgtagctgctacgagacagacgctctcgttccggatcagagcagcagacagaactggcacttttagggtccaaaccctgttgcccacagaacgcccatgacaccagctgggtggagctgccgccgagtccacgccccgtctggctgggacctggagctcccctcaagctgcagatccactctgcaccacaaggtggcctcgcagaggagcctcccgagctttggaaccagaggcaggctcagcgatgctctccatccggcctggccccaccgtgtgtatcaggtgtcagaggccttgctgggtgccaggccacgtctgtgctgtcacagctttgaggggccagcgggtcctagggagaggcccgtgcgacgtgagtaacagcagtttttcttctgacagctgggatggaggtgggtcctccagggagtgccccagtcctcgagagccagacttgtgcacgggcctggaaatgaaggtctcaggcaggggctgcgcacaccgatggtcagcattgccgttcggggcctgcagtcgcccataatgggccctgccccttaggcctggcctcttttgctttcctcctggatggttcctctacccctggtccagcagggactcagcagtgcctgccagctgcagacccccatgctcctgcagcctggaaccctcctgccctccaaaggtcatggggtgacccagggtgggaacaccagaccccctcaccccgtgtccaccgcccatggccgggctcacagtgtctcagagccgtggtgagccatcctaggaccagtgtacctcacaacctttcagaccagtgaaggccagtgggctgggtggtccaggcatgtccccaacgcaggtccagccatctctgcacagaactggaatctcggttcatttcggtttcagcaggtcccatgtagttagcaggacagcacttgagttaggtctgagaaagaacgcctgtttgtcatggcatttcctgtaaggagcccagagccgtggccccaggttgggacggcggcgccagagctgggcctgagtctgacccaacctgtgctgagtggtcctgctggaatgggaaccccaagaggaccacccctctccaaaagaagggaaaacagtaagagagagggaggctgcaggggcccagaccttggctgaccttcctagccatggtctccaccctccgagacccaggggccccgcagtgacagcagggtgttgggccacacagagcccgagtaggtaaaggaaggttctggaaaccacttttcagaacccaaaaggtgtctgggaaatggcgttacctgccactgttgttaagtgtttactttgtatcaatactgaattgttaaaaattttaatcataaaaaccaatggaacatgaaaaaaaaaaaaaaaagggcgaccgctcgcgatctagaa

SEQ ID NO: 192 - DNA, 2179 bp, Homo sapiens
ctggccgccgagggtcgcggcgcccaggctgccggagccgccgccgtctgggctcggatccgggaagctgcggcgctgccgcggcagcggcgggcccctcatttgcatgcgattagcatgcgcccgcccgcctcatctgcatgcgcattcctcgcgccgcattcctgagcttaaccccgccgctgccggcgtcgccgcaccagctcggacgcactgccccgcggggccgcggctccaggtgggaggaaggcgggcgaaggaatgtgcggccagctccctccccttgaccccagatagctcccctgggccaaacgccgagaggttttagagtttctggacggggaagattgcaaaagtctccgcaaccttctcaacctctttcgtcttctagggaaaccacaaaactttcgagaggaaaggggtggcgggcggggagctctcctccggagaaaaaacctcaacaagcggagagggcacaaaggctccccacgccacgccccgagcccctccggcaccccaagggcggtccggggtggtgggaaagcgccaagccctgggagtgcgtcggtgggtccgggacggcggggcctccgccagggctcctggccctcgatgacctcggctgagaccgcgagccgcgcggcggaaagcggaggaactcccgtccggccctgtagccgcccgcaccgcgccccgtcacccgccgccccttcgcgtccgggcgctccagccgcggggccccggaagctcctggtccctggcctcccctgcttggttcggggcggttggccgtggacgcgccccgactctagtcccttccgtccagccgcccgccccaggatgtccccccaccgcagccccgccgtggccaggaggtgtgggcggccacgccggagggacccacggcggcgccggacgcccgcccttcctaggccctggcccggccggggtgggccgggacgttccctgttgcataggcatttatttattcagcagctactacgtacgtgctggcccgcactgccgagggaccggacgcctgccccaggcgggacaatgccgggtgcagcgctggcggggcctggacgccaagcttcagggtccccagcccctcagtcagagggggcgcctcccaggccctggactcctctccagccgggtctacaccaccgtcccccgtcatcttcttctgggttactgagcagcttcttttaaaatagcaacaccgaggaaggccccgaagcccagtcttgcacctcgtggtgtgaagtcgtttaatcctgcccgctaatgcgtaaggactttccaccgtgtgcaggactccgcgctgggcaggggctctcgcagggtttgaaccgacctccgcctcccctgcgggttcacaggcctgcgaggaagtcgcgtgaaggagattcgctactgtgtgaggctggcctgcgcggcgtgggcagtagctgtccggggctggggacagctttcggctccccaggccatcccgtcggggcatctgcggccaatctcgaaggtggagaggctcagggttggaacagacttcacggaaggggtcctagaagaggaaaggggtcgtgtttgcccttagagcagtctgggcgtgaagcggaaactttaaaccaccagaaactctggagagcttggagcacctgggaaggagcaaccagagtgggccggaggtagggaaggaaggcacccacggcgaatttgcccgctttgaccgcatttagggcggccgcttgtgcagccagccttctggaaggtaggctttgcgcttggtgaagagaagcccccacctccggatctgtgttccgccccagtccatttatcaggaggtgatcacacaagtcaagcttctctagttcccggtggaatgagacgccctggtggggtcttaaggttgaacgtttgaatactgtaaaaaagatgggacctgcctacaattaatctctcacactactgagcgaatgtgcgttgttttggacttccctaaattggcccaaatgcatagccaacacttgaattgcggtgtactaacaacatcattcagcaccaaaccaaaccattcttatttaaaccttgcttcctagcttatttatttcccaaacaacttgaaaacatttgttatactaaaatgtctacatcttactattaaaaaaaaaaaacc

SEQ ID NO: 193 - DNA, 1733 bp, Homo sapiens
gcgggccgcctggccctgggaaagcgtcccacggtgggggcgcgccggtctcccggagcgggaccgggtcggaggatggacgagaatcacgagcgatgtggccctggcgttgagtttgtggctgtggtcgcttcggggccccggtggcgggaccaggggctcgtgaggcaggtcttggtgggtgccgagggccttccggcgtcccaggcggggcgccgcgggaccgccctcgtgtctgtggcggtgggatcccgcggccgtgttttcctggtggcccggccatgcctgaggtttctccctcagccgcccctctgcgggctcccaggtgcccttgccctcgcggtccccggcccttgcctgtctgcgcccccttccccgcccgccgcccgccgatcctctctcctccccgagcggctcaccggctttacgtcggttggtggccgcgtctgggaccgaaccgggcaccgccttgtggaaaaaaaagaatagaatataccctgttaaatcagacatgatacttgcttttgtggagcttatgctttagtgcagaaacagaaagtcaagcaaaaactcaaactatgtaactttaaattggatatgtgctaatgaaggaaaatgtggcactgtaagaaaaaataatagggagttaaaggataaataggagtttgctggatgaaatttatgaagagctgaagatttcaaacaaaagaaactgatgcaggagggtgcagctttggagtcaagaatgaagttctaggagatagagagcaaagaaatggtgggagaggaggtcaaacaagacaaatctctcctctgccttctccttatcagactactcaacatgaaggcaataagaatgaagacctctatgtataattgacttccacttaataaataaggttacttggtacactggtcgacaaaaccttgaaatgttgatgtttaagggctgttgattgctggcagcaaagaagtccaactgtgctggtacccgagatagcgtctccacattttcttccaggatcatcacctttgttctaaatagctcccacatagtgtgaacagaagtcatatgttttagattttctgccttggcacccaggaaaccagtatgattgagtaaacatattaaacttcctctgcatttccagcctgaacagatgttgagtacaagctgatccacctacgttcaacctgagagagtccacatccacagactgtttcatttccctttttcaatttacatagaagcatagattcttgctggcatatacaaatgcgccatttaaggcaatcaaaaatggttccacatctcatctgatttccacaattgttgctgtaacgatggactactgaggagagagacaatttctctggcacatcttcccacgttttagcaacatgttcatggagagccaatattcagtaattacagcccaattcctcacaatttcacaattcgctaacaatatgcattttcacaatgtaaagctgattttcctttaaccaaatcaaacatgaaaagatagctgcatgcaatgggcaatctagatcattagaagattgatgtaaaattagaggacactgagactggaatagattgcaaacttcagggagctcagaaaacttgtaaactctacattttgaggaaatatgttgtcgatgcttttgcaactctatgcagtaacttaacaaataaagccttaaagtaacttaaaaaaaaaaaaaaaaaa

SEQ ID NO: 194 - DNA, 2023 bp, Homo sapiens
cgagtgttggcggggactgagcctcctgcttgaggtagttgtttttactcccagtccccaggctcacgagccccacgcgcgctcaatctgccctcccgcttctcctcgccactccgagttctgcgccctcgagatccagcgcatccgcggggtgggcgggtcctggcggctctttgccctcttccaacatggccgccgctgcctctgtgacaggcagggtcacgtgggcagcctcgcctatgaggtcgctggggctcggccggcgattgtcccttcccggaccccgtctcgatgcggtgactgccgctgtcaacccgagcctgagcgatcatggcaacgggctcgggcggggaacgcgtggcagcggctgcagcggcggcagtttggtggcggactggggcggcggagcggcggcggcggcggcggtggcactggcactggccccggccctgagcaccatgcggcggggcagctccgagagcgagctggcggcccggtgggaggcggaggcggtggctgcggccaaagcggcggccaaagctgaggccgaggccacagcggagacggtggcggaacaggtccgcgtggacgcgggcgcggccggggaaccggagtgcaaggcaggggaggagcagcccaaggtcctggccccggccccggcgcagcccagtgcggctgaggaggggaacacccaggtccttcagcggccgccgcccacgctgcccccgtccaagccgaagccggtgcagggcctctgcccgcacgggaagccccgggacaagggccgaagctgcaagcggagctcgggccacggttccggcgagaacggctcccagcggccggtcaccgtggacagctccaaggccaggacctccctggatgccctgaagatcagcatccgccagctcaagtggaaggagttcccatttggccggcgcttgccttgtgacatctactggcatggagtttcatttcacgacaatgacatattctccggtcaagtgaacaagtttccaggcatgacggagatggtgcgtaaaattactctgagcagagcagtgagaaccatgcagaatctctttcctgaggagtacaacttctaccctcgctcatggattctgcctgacgagttccagctctttgttgctcaggttcaaatggtgaaagacgatgacccctcctggaagcccacttttatcgtgaaacctgatggtggttgtcagggtgatggaatctacctcattaaagaccccagtgacatccgcctggcagggaccctccagagcaggccagcggtggtccaggagtacatctgcaaacctctccttatcgacaagctcaagtttgatattcgtctgtatgtcttactcaagtccttagaccccttagagatttatatagccaaagacggactctctaggttttgtaccgagccatatcaggagcccacccccaaaaacctgcaccgcatctttatgcacttaaccaactattcactgaacatccacagcggcaacttcatccactcggacagtgctagcactggcagcaaaaggactttttccagcatcctttgtagactgtcttccaaaggcgttgacatcaagaaggtctggtctgacatcatctccgtggtgattaagacggtcatcgcgctgactccagagctcaaagtcttctaccagtcagacatccccacggggaggccgggccccacgtgcttccaggtaaccattgccagttcccagcctgcgtttccagccttgaccggcctcaagagggctctctggcttcgtgtaggatgagtgatcggggtgggatggccagaggaggggacagtgttggtggtgctgtgggcttgggtgttaaacctgggcccaacttccaagctttctgtttgctccctgtgtgatttggggcaagctacttcccctctgttacctgtaaaatgaaatgaagaatacctatcttaaaaggttcttgtaagaattaaatgagataacacatgtaaaaaaaaaaaaaa

SEQ ID NO: 195 - DNA, 1908 bp, Homo sapiens
agcgccgccgccgccgctgctgcagcagcagctgctctgcagagtggtggccggggccagggccggggtgccctccctcccaccttctcccgccatgagccagggaagtccgggggactgggcccccctagatcccacccccggacccccagcatcccccaaccccttcgtgcatgagttacatctctctcgcctccagagggttaagttctgcctcctgggggcattgctggcccccatccgagtgcttctggcctttatcgtcctctttctcctctggccctttgcctggcttcaagtggccggtcttagtgaggagcagcttcaggagccaattacaggatggaggaagactgtgtgccacaacggggtgctaggcctgagccgcctgctgtttttcctgctgggcttcctccggattcgcgttcgtggccagcgagcctctcgccttcaagcccctgtccttgttgctgccccacactccactttctttgaccccattgttctgctgccctgtgacctgcccaaagttgtgtcccgagctgagaacctttccgttcctgtcattggagcccttcttcgattcaaccaagccatcctggtatcccggcatgacccggcttctcgacgcagagtggtggaggaggtccgaaggcgggccacctcaggaggcaagtggccgcaggtgctattctttcctgagggcacctgttccaacaagaaggctttgcttaagttcaaaccaggagccttcatcgcaggggtgcctgtgcagcctgtcctcatccgctaccccaacagtctggacaccaccagctgggcatggaggggtcctggagtactcaaagtcctctggctcacagcctctcagccctgcagcattgtggatgtggagttccttcctgtgtatcaccccagccctgaggagagcagggaccccaccctctatgccaacaatgttcagagggtcatggcacaggctctgggcattccagccaccgaatgtgagtttgtagggagcttacctgtgattgtggtgggccggctgaaggtggcgttggaaccacagctctgggaactgggaaaagtgcttcggaaggctgggctgtccgctggctatgtggacgctggggcagagccaggccggagtcgaatgatcagccaggaagagtttgccaggcagctacagctctctgatcctcagacggtggctggtgcctttggctacttccagcaggataccaagggtttggtggacttccgagatgtggcccttgcactagcagctctggatgggggcaggagcctggaagagctaactcgtctggcctttgagctctttgctgaagagcaagcagagggtcccaaccgcctgctgtacaaagacggcttcagcaccatcctgcacctgctgctgggttcaccccaccctgctgccacagctttgcatgctgagctgtgccaggcaggatccagccaaggcctctccctctgtcagttccagaacttctccctccatgacccactctatgggaaactcttcagcacctacctgcgccccccacacacctctcgaggcacctcccagacaccaaatgcctcatccccaggcaaccccactgctctggccaatgggactgtgcaagcacccaagcagaagggagactgagtgcctcagcctctcaccccctcctcctcagggcagcgctaggggcctcccctatgcctcagccccatctctgctcctgtttgaattttgttattgttgtttggttgttgtttttttaagttgattttaattttttgtttggttgatttttttgtaaaaaactattttatatataaatataaatctatatctatatctattaaaaaaaatgaagtccagtcatattgatgttaccatta

SEQ ID NO: 196 - DNA, 1422 bp, Homo sapiens
ccgacgcagccgccggcccgcccgccagtctgggctcctgcacatctggcgatcccgccacatctgggcagccggcgctggagcatgaacggctctcaggcgggcgccgcggctcaggccgcctggctgagctcctgctgtaaccagtcggcgtcgccgccggagccccgcgaggggccgcgcgcggtgcaggcggtggtgctcggcgtgctgtccctgctggtgctttgcggggtcctgttcctgggcggcggcctcctcctccgcgcccagggcctgacagcgctgctgacccgcgagcagcgcgcgtcccgcgagcccgagccgggcagtgccagcggagaggacggcgacgacgactcctaggcgcccggctgcgctcggtggtcgcggcctccaggcagcccctgactccgagcggtccggagcatgcccgacggctgctgcggtcccgaccccttacccgaagcggcgcgccccacacagagaggagaagaagagaagaggagaggagagaagagaagaagagaggagagaagagaagaggagaggagagaagagaacctcagaggatccagaacggcagctggtccttgctggactgttcctgtccatgtgcctggtcatggtgctggggaacctgctcatcatccggccatgagccctgactcccacctccacacctccatgtacttcttcctctccaacctgtccttgcctgacatcggtttcacctccaccacggtcccccagatgactgtggacatccagtctcgcagcagagtcatctcctatgcaggctgcctgactcagaagtctctctttgccatttttggaggcacggaagagagacatgctcctgagtgtgatggcctatgaccggtttgtagccatctgtcaccctctatatcattcagccatcatgaacctgtgtttctgtggcttcctagttttgctgtcttttttttttctcagtcttttagactcccagctgtacaacttgattgccttactaatgacctgcttcaaggaggtggacattcctaatttcttctgtgacctttctcaactcccccatcttgccgttgtgacaccttcatcaataacataatcatgtatttccctactgccatatttggttttcttcccatctcggggacccttttctcttactataaaattgtttcctccattctgagggtttcatcatcaggtgggaagtataaagccttctccacctgtgggtctcacctgtcagttgtttgctgattttatggaagaggtgttggagggtacctcagttcagatgtgtcatcttcccccagaaagggtgcagtggctgcagtgatgtacacggtggtcacctccatgctcaacccctttatctacagcctgggaaacagggatattaaaagtgtcttg

SEQ ID NO: 197 - DNA, 4931 bp, Homo sapiens
cggacccgcccccttcagcttgggaaagcgaaagcgtggcaggggccggacctgggagcggaggaggcgggtctccatagaaacctccacctgtttccggccgggctgtgagagattaggggctgctgcgggggccaatctcagccagctcgcctcttcccagcggcctctgcgggagcggtgggtgttgtacacaatcatcatggcggcggccggggccccggatggcatggaggaacctggcatggacacggaggccgagactgtggctactgaggctcccgcgcggcccgtcaactgcctggaggctgaagccgcggcgggggcggcggccgaggactccggcgccgcacgaggcagcctgcagccggccccggcccagccccctggggaccccgcagcccaggcctcggtcagcaacggcgaagacgcgggcggcggcgcgggcagggagctggtggacttgaagatcatctggaataagaccaagcatgacgtgaagttccccctggacagcacaggctccgagctgaaacagaagatccactcgattacaggtctcccgcctgccatgcagaaagtcatgtataagggactcgtccccgaggataaaacattgagagaaataaaagtgaccagtggggccaagatcatggtggttggctccaccatcaatgatgttttagcagtaaacacacccaaagatgctgcgcagcaggatgcaaaggccgaagagaacaagaaggagcctctctgcaggcagaaacaacacaggaaagtgttggataaaggaaaacctgaagatgtgatgccatctgttaagggggcccaggagcgcctgccaacggtaccgctgtccggcatgtacaataaatctggaggaaaagtgagactcacctttaaactagaacaagaccagctgtggattggcactaaagagcggactgagaaattgcccatgggctccataaaaaatgtggtcagtgaacctatcgaaggacatgaagactaccacatgatggcgtttcagttgggccccacggaagcctcttactactgggtgtactgggttccaactcaatatgtggatgcaatcaaagacactgtgctggggaaatggcagtatttttgaaagcactttcacctctggcccaggagactgacccaaagtgaaggacattgccgggagaggcctgcagcatccctggatttcagagttctggaactttgttcataaaaaatctatattcaatctgaggtgatgtggtgactgaagccagaggtgatgtactttcaccattagcttaattttaacttaaaattaccagttccctttcttgcagtcagcttcataccatttttaaagtcaatacgatggaaatcaataaatctgaattccgaacatgttgtgtggaatactcttaagtgtgtttgagagtagatctgccaattatgttgacaagggaatgatcaaaagctttgttttttttaaaaaaaaaaaaagcagtttcaattgaaatattttcatacatctttggttgcaaacatttggactgcattgcaatgagttggggtgttttttttttccttttttgtataaaattgtatgcaaaatgggggtgggttagtaagccacatatttctgtccattgattcagatttaattctttccctttttcattctctcgcttcctcaatttgagtttttgttttaagaacccaaagatgtcagttcttcttttggtacctcatcaacgcttcctttcctgggctccctcccgccgtgctgctgctgcctgtgaacgcacggtgggagaggaagagctgctcagtcttgggcaaggagctctcacacttgctgtggtgttcgttgagcagcagagtatctcccagtgactcctgtttaaatgtcttgccctttgggcccccatctccaaggagttccattgctggttggatgattgtctgcacccctcactgagcttggcctagaggcccagcctggcatggttgtgcctgggctgtgccgctcaacagccccagctcccaagcagacaaagacctcttccaggaggagccaggtagaagatagttatacagccatatagctgcagatccagataaccttctttctttggaagttttcaagaaattcttaagcagtccaaggatgatttcaattatgcttctccattgggtccttctgctcatgcattcagttcaagtgtcctttatcccaggttcagagatgctgcctttctgaagaagacatctgaccctagcaggttggccagtgttattgaacaacaaaaatgggataaattgctttcatgattagctcaccttcttctggttttagcccttctgttctctgtacacgtgaacttctgtcatctccttctggcttggttgcctctgaaaggagggaaagtctcttggtaaattatctcttttgtgctgtttgctgtttctctgctgccgtctttgcagttctcctctcactggttgcaggctttcatagtaaggtttggcgagaaatgttccaaacatcacattttggattctaggctgtcacccctcattctgtgaaacgtattagcatgtgttcgcccaagatgactattccttgtgagccagttaatgatgatattctacgcccttcccttctaagctgtagttcaggaatccagcccacatagacagactcttgctttccatggtgtagtcaatgccaagtgatgcatctaggcaggaaaatctactctttgcttttttgggggcaattagtacatttgtgaagtgcagcatccaagaaacagcctgttttttcatcccttgagaaaggagcagtcattgcagcttttctgtccttgtcggcctgcagttcctggggaaaagagtacatctgagctacttgtccaagcctctgtctgcaggtgacaggttttgggggaaatgagatgcattaagtagaacatcatctcgggtcagacattgccccttttgtttgccaatgccccagtcctagagacttgtcctgacagtgccgcacacctacttttgatctctcagagcaggtggctccatccccagactagcctggctgctctccgaggcccctccacctgctccccttattgccccattcttgtggcttgccgggccacttggcctcccttcttgccggtgacagcgttccatcatctccccgctccccaagggccaactgcttctcactcaggctggtgtcatttcaggaggaccaaagcctgcgtgagcctttttattttcagtaaaatggtgcttttttccttacttcgagatactatatataaataataatgtaaatgacaccttttcgtacggagctgtttgagtattgctttacagagctcactaaatcagcttcaacaatcttgagctctgtggctcctcaccctgtctgcatggaagaccttgctggacgctctcgggagagcagacatagcaccagaagccactgggagaagtgttttcgatccgtgtctgggccacagtagtattcactgtttagtctttgagttccgtaagcagtctcttcatacatttcttacagtctggagtgtactgactaaatctgtgtaagcaaattgaaatactctttcttttaggtagcgtcacagtggttttttttttcctcaggataatttctatacaatttccttactgtcagagggaccagatctttccctcactgtggcaggggccgtgcaggtggataaaggaagagctggtttccggagagtgactgtaacagcgttgactcgaagctagagatggagggggtggccgtctcttagacattggacacctctcagagcctcctgagggcttctttgtcttctagaatctctaccggtggtcctcctgcaggttctggctcacagacatcatcatgcctttttttccctccctgaggcgccttggcagaagagcgtgaccctgtgagccaggccccccttagctctgcttcagatcacagaacacagacagactcgcgagttgctggacctctttggtattaagtgtttgaatccatggtgggccttttgcaagtagcgttagctctttttaaatgttgaactgagctaaggatgcactttcttgtggacatagaaggggcccacgtaaggccctgagtaggctccttagttgctgctttacctgatgagggccaaagagattaactctgcctcgttgccatgtctcagaaaagttgccatatttcacccagaaggggcttgttttcctcttactcttactttaaccatgtgcctggaggagccattctgggctcttgcacttgcccagcctttctttgccaggggcagagaagggaaagggggtagattgagtgtgccaagggccgtgcaagggcaggcttgctttccacccatctgctgagggagccctctcctctcgctccttgcctctgttcacacctgttgtcttggaagaggatggtccctttgtcttaaggctttgtgataaagtcatctccagttaggatctgcacctgtttccttcgtaatagtgcctggcggcctttctgaagttacaggtggttgggagccctctcgcatgcagaacatctggtagattgatctgccaggctgggtggttctactgctttctcaatttctaagaaccttttttttttcttaaagagttctgctgaattatttgacaatatttgtaagtaccatgtttccttgtggtgtatgctctgttctggtttctgttttcaaatcaaatgcctgtttgggaggagatgaacgtatttagtctattagatttgcactgctggattttttttttaaagtgtaaccttgaatagctgtcttattgtttatcctgtaagattagtcaatcgattaaagtttgataattaa

SEQ ID NO: 198 - DNA, 2184 bp, Homo sapiens
agcggggctgggattgcggaagccctccacagttcataaccgttggctggttatgaaccgttcataacgggcgttaataaccataccctgttagactaagcatggtccacccgcgaatcctctacagagatggccaagcgctggggtcgtggctgcgtcctctaggccaggccttggtgggcagctgttgacatgtccagaaccccaggaagtgctgaaggtacctgcagttcaggccccatggaagcccagacctccttcacccttcggggacactgaaattggccaaatgtttaggccatgaggatggctgctgagtaagccgataatccttacatcggacacaaccttgtgcaaaggaccttctcaccacagatcagccagaccatcttcctccttccaagtcatcaaagagttccaagctggtcacctgtcccttgatgttcccaggaaaccaggaaagaggacccctgcattttatcttcccatccagagtggcaggatctctgcctgggaaacaggcttcattcagcacagctgtggtagcattaacaaagcaaagtgggcacatgtagaagttgaagctaaaacattcaagaactccagtctgtttctgtggatgttaagggggtgaagataaaacaatggaggtgatgaggaggaataacttgaagacagtttaaagccacagtgatacaaagaatgaagagaaggaaggtgctggattttactaagaaaacagactgagttcaggagtctcaccagtagaactttatagtattgcgtttcgattacatgtgtgtgaattttaaaaactgattaccctccagtaaaaatgtggaaccaatttgcatttggattaaaacattaggtttggggacaaaagtggaccccatgctgcctgagatgaagagagagagcaggatggcagaggaatcaccagctcaagaaaccccaagacttggacagtcttccagcagaagaggccagggtctctcagtgtactactccaaacaggcctctcctagagatgtagtctgggaaggtccaaaacccaccagacaggcacatccagtggggaaaagacttcccattccagtgtggcctgcatccctcacctctgcttcccagtcttctgctgacctcagaggagcagggtggccattgctgatctgggttagggagatgccagaaacacacccaggtttgaaccacaggttagtggtacaaagtcacagtccttgtgccttcagaaaacccagaggccccaaatacgagtgggaagagagttgggaaaaactgaaccagactcttccaatggccattaaagagaaaattcagcaacgcttgcctttgtctttgaccctgagaagttaagggacacagattgtggcgccgtgatggaacatggagggaaggcatggtgtgcttcctgcagagatgcctctggagtccctgtggccacgggatctcactggacccctcttcaggcaccttgatggggctcagtggggccaggccgaagggtggaagtagaaaagcatcaacaggctgtccagatcaattggcaccatccaagaccctgctgcacccacacatggaggtcaccagctcagccccaggggttctttcacacacaagctccttccctaaggagtcctgtggggttccacactcagtgtgctgcccaagtcagagatttaccacagatctgtctccccctcaacctggactcaagttactgtggtgagaaacctcactgtccatggttaactgaagaaatccctccttcagaaagaacttgagtagtagatgaggtggttagacaggatctttttccctcaagctgtttggacgccacagccaggaccaactctgacagctgcgagagagagagcccctccaatgtggaacctcctacacagccccccttttgggtccctggatatgagcccccagcaggaccaccactctagggggaagtctccctcccatccctcagatccccacattgttcctcctgtaggagaaaagtcagccctgcccctggagcttctccaagatggcactggactcgccgttatcttgaggagccaggagctgaaatggctccggcttagcaacccagtatggccaaagtggaaaggttctctgtcctttgcagtcaccaaaaaaaaaaaaaaa

SEQ ID NO: 199 - DNA, 6501 bp, Homo sapiens
gtattctgaggatgttgtttgctttgggctaagaaaagaaaaaatacaactacagacaaagcctttatatctgcaagtattatggcgtggtcggtagcaatgtaattagatttacatcagtcttcctggtgagacttggaggctcttcctcggtagacatgagtgacccaaggcagtcacaagaagagaagcacaagctaggcagagcctcttcaaagttcaaggatccccctagaatcatgcagtcagatgattattttgctcggaaatttaaagccattaatggcaacatgggacccactacttctttaaatgcctcgaattccaatgagactggcggtggtggtccggctaatggtaccccagctgtgcccaagatgggtgtgagagcaagggtgtctgaatggcctcctaaaaaggactgttccaaggagctaacatgcaaggcactgtgggaaagccggtctcagaccagttatgaaagcatcacttctgtcctgcagaatgggcagagtgaccagagtgaaggtcagcaagatgaacagctcgatctggacttcgtggaggccaagtacacaatcggagacatctttgtccattccccccaaagaggacttcaccccataagacagaggagcaatagtgatgtcactatcagtgacattgatgccgaagatgtcttagaccaaaatgcagtcaaccccaacaccggggctgccctgcacagggagtatggaagtacttcatccatcgacaggcaaggcttatctggtgaaaacttttttgctatgctcagagggtaccgagtagaaaattatgaccacaaagcaatggtcccttttgggttccctgaatttttccgctgtgaccctgcaatctctccgagccttcatgcagcagcacagatttctaggggagaatttgtccgcatctcaggattagattatgtggacagtgccctcctgatggggagagacagggacaagcctttcaaacggaggttgaaatcagagtcggtggaaacatctctcttccgaaagcttcgaactgttaaaagtgagcacgaaactttcaagttcacgtctgagctggaggagagccgactggagaggggcattcgcccttggaattgtcagcgatgttttgcacattatgatgtccagagcattttgtttaatatcaacgaagccatggctacgagggctaatgtggggaaaaggaaaaacataaccactggggcatctgcagcatcccagactcagatgcctacgggccagacaggcaactgtgagtcccctttagggagcaaggaggacctcaactccaaagagaacctggatgccgatgagggtgatgggaaaagtaacgacctcgtccttagttgtccttactttagaaatgagactggaggggaaggcgacaggcggattgcgctctctcgagccaactcatcctctttcagttctggggaaagctgctctttcgaatcgtcactcagctctcactgcacaaatgcaggtgtctccgtcttggaagtgcccagagaaaaccagcctattcacagggagaaagtgaagcgctacatcatagaacacattgaccttggggcctattattaccgcaaattcttctatgggaaagagcaccaaaactactttggaatagatgaaaaccttggtccagtagcagtcagcatccggagagagaaggtggaagatgccaaggagaaagaaggatcccagttcaactacagggtggctttcaggacaagtgagcttacaacactgagaggagcaattttagaagatgctataccctctactgctaggcatggtaccgcacgaggactacctctcaaagaagttttggaatacgtcattccagagctgagcattcagtgtttgcgacaggcttccaactcacccaaggtctcagagcagctgctcaagcttgatgaacaagggctgagctttcagcacaagatcgggatcctttattgcaaagcaggccagagcacagaggaagagatgtataacaatgagacggcgggaccagcttttgaagaattccttgatcttctgggccagagagtccgactgaaaggatttagtaaatatcgagctcagctagacaataagactgattccacgggcacgcactctctctataccacatacaaagactacgaactcatgttccacgtgtcaaccctgcttccctacatgcccaacaacagacaacagctactgaggaaaaggcacataggaaatgacatcgtcaccatcgtcttccaggagcctggggcacttccttttactccaaaaagcatccggtctcactttcagcatgtctttgtcatagtcaaagtgcataatccatgtaccgaaaatgtgtgttatagtgttggagtttccagatcaaaagatgtgccaccatttggcccaccgattcccaaaggtgtaacttttccaaagtcagccgtgttccgggacttccttttagccaaagtaatcaatgcagaaaatgcagcccataaatcagaaaagtttcgagcaatggccactcgaacgaggcaggagtacttgaaagatctggcggagaactttgtcacaaccgccaccgtggatacctctgtgaagttcagcttcattacgctgggtgcgaagaaaaaggagaaggtaaagccaaggaaggatgcccacttgtttagcattggggccatcatgtggcacgtgatagcccgggacttcggccagtctgctgacattgaatgtcttctcgggatctccaatgagttcatcatgttgattgaaaaggattccaagaatgttgtattcaactgttcctgcagggatgtgattgggtggacatctggattagtgagtatcaaagtgttttacgaaagaggagaatgtgtcctcctgtcctcggtagacaactgtgctgaagacatcagggaaattgttcagcgattagtaatagtgacgagaggctgcgagactgtggaaatgaccctgaggaggaacgggctgggccagcttggcttccatgtgaattttgaaggaattgtcgcagatgtggaaccttttggctttgcctggaaggctggccttcgccaagggagccgcctcgtggagatctgcaaagtagccgtggccactctgacccacgagcagatgatcgacctgctccgtacttctgtgactgtgaaggtggtcatcatccagccccatgatgacggctcgccccgaagagggtgttcagagctctgccggatccctatggtggaatataaactcgacagcgagggcaccccctgcgagtataaaacccccttcaggaggaacaccacgtggcaccgggtgcccactcctgccctgcagcccctctctagagcttcccccatccccggcacgcccgaccggctgccgtgccaacagctgctccagcaggcccaggctgccattcctcgaagcacctccttcgaccggaagctgcccgatggcacgagaagctcacccagcaaccagtcatcctccagcgaccctggacccggcgggagcggaccctggagaccacaagtgggctacgacgggtgccagtcccctctactgctcgaacaccagggctcaggccctttggaatgtgacggagccagggagagggaagacaccatggaagcaagcaggcacccggaaaccaaatggcatggcccaccttccaaagtcctgggttcctataaagaaagagctctgcagaaagatggaagttgcaaagattcccccaataagctttctcacattggggataaaagttgctccagtcactccagcagcaacacgctctccagcaacacctccagcaacagtgacgacaagcactttgggtctggcgacctgatggaccccgaattactggggctgacctacatcaaaggggcctccaccgacagtggcatcgacacggccccctgcatgcctgccaccatcctcggccctgtgcacctggcaggcagcaggtccctgatccacagccgggccgagcagtgggctgatgctgccgacgtctctgggcctgacgacgagccagccaagttatattctgtgcatggctacgcgtccaccatctccgccggcagtgctgcggaaggcagcatgggcgatctcagtgagatatcctctcattccagtggttctcaccattcaggaagcccttcagctcactgttcaaaaagtagtgggtctctggattcatccaaagtctacatcgtgtctcacagcagcggacaacaggttcccgggtccatgtccaagccctaccacagacaaggggcagtgaacaaatatgtcatcggctggaagaaatcggagggcagcccaccgcccgaggagcctgaagtgactgaatgtcccgggatgtatagtgagatggatgtcatgtccacagcaactcagcatcagacagtggtgggagatgctgttgcagagactcaacatgttctgtctaaagaagattttctgaaattgatgcttcctgacagccccttagtggaggaggggcgaagaaagttttcgttctatgggaacctgtctccaaggaggtcgctttaccgcacgctgtctgacgagagcatctgcagcaacaggagggggtcctcctttggcagttcccggagttccgtgcttgaccaggccctgcccaacgacattctgttcagcaccaccccaccctaccacagcacgctgcctccgcgggcccaccccgcacccagcatggggagcctgagaaatgagttctggttctccgatgggtccttatcagataagtccaagtgcgcagatcctggcctgatgcccctcccggacacagccacagggttagattggacccacctcgtggatgctgcacgggcatttgaaggtcttgactcagatgaagaactggggctgctctgtcaccacacgtcctatctagaccagagggtggcatccttctgcaccctgacagatatgcagcatgggcaggacctggaaggggcccaagagctgcccttatgtgtagatccaggcagtggcaaagagttcatggacacaactggggagcgttctccatcaccactgaccgggaaagtcaatcagctggaattaattcttcgacaactccagaccgaccttcggaaggaaaaacaagacaaggccgttctccaagcagaagtgcagcacctgagacaggacaacatgagactgcaggaggagtcccagaccgcgacagctcagctgcggaaattcacagaatggtttttcaccaccatcgacaaaaaatcttagccaatccgcacctcatcaagggaccactgggaaatgccccttgtccctttgaagtcacaaacatgtggtttttctgtgtgctttcaaccaatcgtagatgtttttgctgttccattctgtgtagcaccattcaccacagcaggatagggagcctcgactctttctcggtaaccacggcagagagcagcgccgatgtgaagatgaatgaatgtaactcctggtgtgaagatgaatgtaaaccctggcgacagttgagacctttttcttttagactctgctaaaacagtgctctggcttgggcttacctcaagagggaagatagttgagttttatttcctgtatatcaggtgacctggtagagatgtaaagcaatttaccatagtttgggctttagtattgtaaaataaacatgagaacaaataatcagacatatactttaatgttaaaggtgctctatttttttggatgtacagtagttttatttccacagccacattaccatagcaataagaaaggaggcatagtacatagttggaaaagctttgtggggggattaaaaaaaaaaaaaagcactgttgtgtttaacactagttcagatgcagttaccttagagacttatttatttgcaggaacaaatggtgcctgaatattaacagtgttctgattaaaaacaaaaaaaagatacatatgccttgtaaatggctcaccgagtggtcagtagtcacttcaactcttagttcacttttgtatagttgctctgctggaaagaaatgagagtgaatctgcttactcactagaacttccctgtgtgctgtgagccagcggaaccacttgtacaatgccagatttgtttatctttgtacagaagctttgatgaagtgtcttgtatttaacacccttatttaagcttatttaaccttaaattgttaattttataaaatttggtttggcctgcactacgatgagggatggaggtagctgcaggctcagaagagactgagcttgcacagatcagaccgagaagcagggtgagagattctaacgactggatgctgctagtaacacattgtttgtattgctttaccatttttaactgttagatttgagatgaacatacattttgcttttttaataaatgtttaaaagaagtccacataagaaaaaaaaaaaaaaa

SEQ ID NO: 200 - DNA, 2566 bp, Homo sapiens
atggaccaagcaacttctctgagccagatgctggggacgcagaggtgaacccagagacatgatcccatctgctcagatcttcatgtcagaacacgctttattacagtctcggcaagggggtggctccatctgggccgcatctccaggactcctggcctggacttctctttggacctcgggtgaccttggattctggccacagtgacttagcggtcagactccggtggttttctagcccgctgggtgactccctgaagatctcatcctcttcacacctgttgggatggagcctcccatggataggaactcttcctggttgatgctcagcagatgactgatctggctctggaggacagctccaggggtatgagggaggcctggcagcccactactccctcctcacctgctcgggccctgcctgctgggccctattgtctgggtctgggggccctttcctgccccatgtgaacttgattcctcctcgcgtttctgccggtgaccagacagagcctggcctgggccaagtccccactgaccacactttccccaaggctgggtctcaaaggaccctacaagatggggacaggaacaaggatgggagtcggggaggggctgtcaggcagagggcagatgcagctcctcgggtgccgctggctggagtcctttgtctccatttgctcagtgcgtaattgtcattttgtgggggacttccttggtggggcttttccatgcttttcctctccctgatggttacaaagaggagacagtcaggatctgggaggagctggagccttccccctgtgctgttgaactctgggaggggcagccagaggggctgagagtgcaccatcctgaaaagagagggtctttaagagataagatttaggctagggaaattcactagaaagagacaggtggccctgggttttttttcctgccatccaaagggaaccagtcttacccaaaggcttaaggggtcaccttagcccagtctcaggacactcttctccaatcagatcgctgcttctagttgcactgctcctggattctgttcttggggaacagaaggtggcaggacaggccccacaatctgcaattccagctccctccagaggggacagtcccagcgtttgcaagagagcagcttgtggcctcccttaggcaagtttaaaagccagatgtcctttttcccagaatgcggagtggtgtgtactattcatcaacttgggctgccacagcaccatgccagactggatggcttaaacatcaggaatttattttctgccagttctggaggctggaaagtccagatcaaggtgttaagacttggtttctggtgaggcctctctccttggcttgcaggtggcaccttctcactatgtcctcacatggccttttctctgtggagagggacagagagcatgagcaggctctggtgtctcctcctcttcttataaagacactaatatcaccattttagggcttaaacctatgacctcatttaaccttaaccccttaaaggtcccatctccaaaaacagtcacatagcaggctactgcttcaacatatgcatttgggggaggggacaccattcagttctcaacagggtggtcaccgcaaacatggaaagtcagagccttctccccttcagaattcccgcccccacccagggatggggaagaggagcagagaggtatgggaagcagacacggagagtggcaggtaccatgctggggtggctcaggagtgcttcggaggacatatggaactggcagggctcagtgcagggaggtggaggccctgggagagccgtgtcctgagaagggcctgggctacaaccctgggcaagttacttcacctctgagcctccgatgctctgtgaaatggaaggaatgtgcttgcctgtcaggtgcagggagaattcagtgagattgtgtgcctagcacagtgcctgactcccagtaggtgctcagcaaatgctcccatccatctgggagtatagacttagggtttatctatttttttttttttttttggctctctggactttaaaactcagcatcttctgaaccagaggcatttctgattagcccttccctacctattttcctagtatcactctttaatcagcttggggaggtggcagcatttcatggcctccgtagtaactcacaatgcttcctggggtatttaaattctactctctcatcagcactgagcacctactttgggccctttcccgtgctagccatttgggggaaatataggtgaagagtggctggggtttgaacctttaggatttcacagccatgctggatgggataaaaccagctcacatggagaatcagagaatgggacagtgccacaaaacagtctactgaggcacaagttctgagtgcctgggaagtggtagagagaccccagagagggctgctgcagtctggaacagcttcctagcaagctgtaccagacagggccttgaaggatgagaaagatctggctgagatgatacccgaccctctagggaaattcttaaagtaacttctaggaaatgtcattgctcctt

SEQ ID NO: 201 - DNA, 1549 bp, Homo sapiens
gcagcctggaagtcactcgggccaccggagctggcggcgtctccagcgagcggcgcggagctggacgccgcgatcgtggggcccgcgaggcgggcagccggggcgtccagatgcacagtctctgacatcagctctcctgggaccctccaagagcactagtgtctagaaggcactaaggcatggcgaggacaacatccttgctgcctccagctggcgggcgaccacagctactgcctgctctgcgctactgagccactcggtctggagcccccaggacagcacctgcttcctgaggttgtcctggctcagctgtgcacagcgatggtggagaactggactccacaggctcacaaccttcctgtcaggtttcagggcccagcatccttcatcctgggcctggctgccctgaacaatggctgagggctgggggaccccatagagtgacaccacagcgtacggggccagcagcactccagtgcccgtggactatgaccacctatcgggccatccccagcgatggtgtggacctggcagccagctgtggcgccagggtgggcgatgtcctccctgggccacacacaggggactacgctcccttgggattctgggcccagaatggcagcatgtcccagcctcttggcgagagcccggccaccgccaccgccaccgccaccgccaccacccgccccagccccaccactcccgcaatgcccaagatgggcgtgcgcgcaagggtggccgactggccgcccaagcgggaggccctgagagagcacagcaacccaagcccctcccaggacacagatggcacaaaggccaccaagatggcccattccatgaggagcatacagaacggacagccccccaccagcaccccggcttcctcagggtccaaagccttccaccgactctccaggagaaggtccaaagacgtggagttccaggacgggtggccccggtcccccggcagggccttcctcccccttcggcaccgcagcagcagcgagatcaccctcagcgagtgtgacgcggaggacgcgggggagccgcggggggcccggcacacgggggcgctgcccctcttccgcgagtacgggagcacctcgtccatcgacgtgcagggcatgcccgagcagagcttcttcgacatcctgaacgagttccgcagcgagcagcccgacgcccgagggtgccaggccctcaccgagctcctccgggcagatcctggcccacacctcatggggggcggcggcggagccaagggggactcccacaacgggcagcccgccaaggacagcctcctgccactgcagcccacgaaggagaaggagaaggcccggaagaaacctgcgcggggcctcggcggcggggacacggtggactcgtccatctttcggaagctaaggagcagcaaacccgagggggaggctgggcgttccccgggggaggccgacgagggccggagccccccggaagccagcaggccgtgggtgtgtcagaagagcttcgcccacttcgacgtgcagagcatgctgttcgacctcaacga

What is claimed is:

1. A method of localizing an ovarian tumor vasculature in a subject, the method comprising the steps of:
a. contacting said subject with a ligand that binds a nucleic acid molecule, or that binds a protein encoded by said nucleic acid molecule, wherein the sequence of said nucleic acid molecule is set forth in SEQ ID No: 69; and
b. localizing said ligand,
thereby localizing an ovarian tumor vasculature in a subject.

2. A method of localizing an ovarian tumor vasculature in a subject, the method comprising the steps of:
a. contacting said subject with a ligand that binds a nucleic acid molecule, or that binds a protein encoded by said nucleic acid molecule, wherein the sequence of said nucleic acid molecule is set forth in SEQ ID No: 1; and
b. localizing said ligand,
thereby localizing an ovarian tumor vasculature in a subject.

3. A method of localizing an ovarian tumor vasculature in a subject, the method comprising the steps of:
a. contacting said subject with a ligand that binds a nucleic acid molecule, or that binds a protein encoded by said nucleic acid molecule, wherein the sequence of said nucleic acid molecule is set forth in SEQ ID No: 119; and
b. localizing said ligand,
thereby localizing an ovarian tumor vasculature in a subject.

4. A method of localizing an ovarian tumor vasculature in a subject, the method comprising the steps of:
a. contacting said subject with a ligand that binds a nucleic acid molecule, or that binds a protein encoded by said nucleic acid molecule, wherein the sequence of said nucleic acid molecule is set forth in SEQ ID No: 106; and
b. localizing said ligand,
thereby localizing an ovarian tumor vasculature in a subject.

5. A method of localizing an ovarian tumor vasculature in a subject, the method comprising the steps of:
a. contacting said subject with a ligand that binds a nucleic acid molecule, or that binds a protein encoded by said nucleic acid molecule, wherein the sequence of said nucleic acid molecule is set forth in SEQ ID No: 58; and
b. localizing said ligand,
thereby localizing an ovarian tumor vasculature in a subject.

6. A method of localizing an ovarian tumor vasculature in a subject, the method comprising the steps of:
a. contacting said subject with a ligand that binds a nucleic acid molecule, or that binds a protein encoded by said nucleic acid molecule, wherein the sequence of said nucleic acid molecule is set forth in SEQ ID No: 27; and
b. localizing said ligand,
thereby localizing an ovarian tumor vasculature in a subject.

7. A method of localizing an ovarian tumor vasculature in a subject, the method comprising the steps of:
a. contacting said subject with a ligand that binds a nucleic acid molecule, or that binds a protein encoded by said nucleic acid molecule, wherein the sequence of said nucleic acid molecule is set forth in SEQ ID No: 37; and
b. localizing said ligand,
thereby localizing an ovarian tumor vasculature in a subject.

8. A method of localizing an ovarian tumor vasculature in a subject, the method comprising the steps of:
a. contacting said subject with a ligand that binds a nucleic acid molecule, or that binds a protein encoded by said nucleic acid molecule, wherein the sequence of said nucleic acid molecule is set forth in SEQ ID No: 68; and
b. localizing said ligand,
thereby localizing an ovarian tumor vasculature in a subject.

9. A method of localizing an ovarian tumor vasculature in a subject, the method comprising the steps of:
a. contacting said subject with a ligand that binds a nucleic acid molecule, or that binds a protein encoded by said nucleic acid molecule, wherein the sequence of said nucleic acid molecule is set forth in SEQ ID No: 2; and
b. localizing said ligand,
thereby localizing an ovarian tumor vasculature in a subject.

10. A method of localizing an ovarian tumor vasculature in a subject, the method comprising the steps of:
a. contacting said subject with a ligand that binds a nucleic acid molecule, or that binds a protein encoded by said nucleic acid molecule, said nucleic acid molecule having a sequence selected from the sequences set forth in SEQ ID No: 13, 14, 26, 35, 39, 42, 43, 47, 104, 108, 111, 113, 116, 118, 121, 127, 130, 132, 134, 146, 152, 165, 169, 170, 179, and 181,
b. localizing said ligand,
thereby localizing an ovarian tumor vasculature in a subject.

11. A method of treating an ovarian tumor in a subject, the method comprising the steps of localizing said solid tumor by the method of any of claims 1-10 and irradiating said solid tumor, thereby treating an ovarian tumor in a subject.

12. A method of treating an ovarian tumor in a subject, the method comprising the steps of:
a. contacting said subject with a photoactivatable cytotoxic drug or pharmaceutical composition;
b. localizing said solid tumor by the method of any of claims 1-10; and
c. contacting said solid tumor with a concentrated light source,
thereby treating an ovarian tumor in a subject.

13. A method of localizing a renal tumor vasculature in a subject, the method comprising the steps of:
a. contacting said subject with a ligand that binds a nucleic acid molecule, or that binds a protein encoded by said nucleic acid molecule, wherein the sequence of said nucleic acid molecule is set forth in SEQ ID No: 30; and
b. localizing said ligand,
thereby localizing a renal tumor vasculature in a subject.

14. A method of treating a renal tumor in a subject, the method comprising the steps of localizing said solid tumor by the method of claim 13 and irradiating said solid tumor, thereby treating a renal tumor in a subject.

15. A method of treating a renal tumor in a subject, the method comprising the steps of:
a. contacting said subject with a photoactivatable cytotoxic drug or pharmaceutical composition;
b. localizing said solid tumor by the method of claim 13; and
c. contacting said solid tumor with a concentrated light source,
thereby treating a renal tumor in a subject.

16. A method of localizing a breast cancer tumor vasculature in a subject, the method comprising the steps of:
a. contacting said subject with a ligand that binds a nucleic acid molecule, or that binds a protein encoded by said nucleic acid molecule, wherein the sequence of said nucleic acid molecule is set forth in SEQ ID No: 21; and
b. localizing said ligand,
thereby localizing a breast cancer tumor vasculature in a subject.

17. A method of treating a breast cancer tumor in a subject, the method comprising the steps of localizing said solid tumor by the method of claim 16 and irradiating said solid tumor, thereby treating a breast cancer tumor in a subject.

18. A method of treating a breast cancer tumor in a subject, the method comprising the steps of:
a. contacting said subject with a photoactivatable cytotoxic drug or pharmaceutical composition;
b. localizing said solid tumor by the method of claim 16; and
c. contacting said solid tumor with a concentrated light source,
thereby treating a breast cancer tumor in a subject.

19. A method of treating an ovarian tumor in a subject, the method comprising the step of contacting said solid tumor with an antibody or ligand that is conjugated to a cytotoxic agent or cytotoxic drug and that binds a nucleic acid molecule or a protein encoded by said nucleic acid molecule, wherein the sequence of said nucleic acid molecule is selected from the sequences set forth in SEQ ID No: 1, 2, 13, 14, 26, 27, 35, 37, 39, 42, 43, 47, 58, 68, 69, 104, 106, 108, IH₇ 113, 116, 118, 119, 121, 127, 130, 132, 134, 146, 152, 165, 169, 170, 179, and 181, thereby treating an ovarian tumor in a subject.

20. A method of treating a renal tumor in a subject, the method comprising the step of contacting said solid tumor with an antibody or ligand that is conjugated to a cytotoxic agent or cytotoxic drug and that binds a nucleic acid molecule or a protein encoded by said nucleic acid molecule, wherein the sequence of said nucleic acid molecule is set forth in SEQ ID No: 30, thereby treating a renal tumor in a subject.

21. A method of treating a breast cancer tumor in a subject, the method comprising the step of contacting said solid tumor with an antibody or ligand that is conjugated to a cytotoxic agent or cytotoxic drug and that binds a nucleic acid molecule or a protein encoded by said nucleic acid molecule, wherein the sequence of said nucleic acid molecule is set forth in SEQ ID No: 21, thereby treating a breast cancer tumor in a subject.

22. The method of any of claims 19-21, wherein said cytotoxic agent is a radioactive isotope.

23. The method of claims 19-21, wherein said cytotoxic agent is a nucleic acid molecule.

24. The method of claims 19-21, wherein said cytotoxic agent is an antisense nucleotide, or RNA inhibitory molecule.

25. The method of claims 19-21, wherein said cytotoxic agent is a cytotoxic virus or pathogen.

26. The method of claims 19-21, wherein said cytotoxic agent is a nanoparticle.

27. The method of claims 19-21, wherein said cytotoxic agent is an engineered T cell or an engineered cytotoxic cell.

28. A method of impeding a vascularization of an ovarian tumor in a subject, the method comprising the step of contacting said subject with a ligand capable of inhibiting an activity of a nucleic acid molecule or a protein encoded by said nucleic acid molecule wherein the sequence of said nucleic acid molecule is selected from the sequences set forth in SEQ ID No: 1, 2, 13, 14, 26, 27, 35, 37, 39, 42, 43, 47, 58, 68, 69, 104, 106, 108, 111, 113, 116, 118, 119, 121, 127, 130, 132, 134, 146, 152, 165, 169, 170, 179, and 181, whereby said ligand is taken up by a vasculature cell of said ovarian tumor, thereby impeding a vascularization of a solid tumor in a subject.

29. A method of impeding a vascularization of a renal tumor in a subject, the method comprising the step of contacting said subject with a ligand capable of inhibiting an activity of a nucleic acid molecule or a protein encoded by said nucleic acid molecule wherein the sequence of said nucleic acid molecule is set forth in SEQ ID No: 30, whereby said ligand is taken up by a vasculature cell of said renal tumor, thereby impeding a vascularization of a solid tumor in a subject.

30. A method of impeding a vascularization of a breast cancer tumor in a subject, the method comprising the step of contacting said subject with a ligand capable of inhibiting an activity of a nucleic acid molecule or a protein encoded by said nucleic acid molecule wherein the sequence of said nucleic acid molecule is set forth in SEQ ID No: 21, whereby said ligand is taken up by a vasculature cell of said breast cancer tumor, thereby impeding a vascularization of a solid tumor in a subject.

31. The method of any of claims 28-30, wherein said ligand is an antisense or RNA inhibitory molecule.

32. A method of detecting a presence of an ovarian tumor in a subject, the method comprising the step of detecting a presence in a body fluid of said subject of a protein encoded by a nucleotide molecule, wherein the sequence of said nucleotide molecule is set forth in SEQ ID No: 2, whereby said presence in a body fluid of said protein indicates said presence of an ovarian tumor in said subject.

33. A method of detecting a presence of an ovarian tumor in a subject, the method comprising the step of detecting a presence in a body fluid of said subject of a nucleotide molecule, wherein the sequence of said nucleotide molecule is set forth in SEQ ID No: 2, whereby said presence in a body fluid of said nucleotide molecule indicates said presence of an ovarian tumor in said subject.

34. A method of detecting a presence of an ovarian tumor in a subject, the method comprising the step of detecting a presence in a body fluid of said subject of a protein encoded by a nucleotide molecule, wherein the sequence of said nucleotide molecule is set forth in SEQ ID No: 69, whereby said presence in a body fluid of said protein indicates said presence of an ovarian tumor in said subject.

35. A method of detecting a presence of an ovarian tumor in a subject, the method comprising the step of detecting a presence in a body fluid of said subject of a nucleotide molecule, wherein the sequence of said nucleotide molecule is set forth in SEQ ID No: 69, whereby said presence in a body fluid of said nucleotide molecule indicates said presence of an ovarian tumor in said subject.

36. A method of detecting a presence of an ovarian tumor vasculature cell in a subject, the method comprising the step of: detecting a presence in a body fluid of said subject of a protein encoded by a nucleotide molecule selected from SEQ ID No: 14, 35, 42, 68, 121, 127, 169, 179, and 181, whereby said presence in a body fluid of said protein indicates said presence of an ovarian tumor vasculature cell in said subject.

37. A method of detecting a presence of an ovarian tumor vasculature cell in a subject, the method comprising the step of: detecting a presence in a body fluid of said subject of a nucleotide molecule selected from SEQ ID No: 14, 35, 42, 68, 121, 127, 169, 179, and 181, whereby said presence in a body fluid of said nucleotide molecule indicates said presence of an ovarian tumor vasculature cell in said subject.

38. A method of detecting a presence of a breast cancer vasculature cell in a subject, the method comprising the step of: detecting a presence in a body fluid of said subject of a protein encoded by a SEQ ID No: 21, whereby said presence in a body fluid of said protein indicates said presence of a breast cancer vasculature cell in said subject.

39. A method of detecting a presence of a breast cancer vasculature cell in a subject, the method comprising the step of: detecting a presence in a body fluid of said subject of a nucleotide molecule, wherein the sequence of said nucleotide molecule is set forth in SEQ ID No: 21, whereby said presence in a body fluid of said nucleotide molecule indicates said presence of a breast cancer vasculature cell in said subject.

40. A peptide with the amino acid sequence CPGAKALSR VREDIVEDE (SEQ ID No: 88).

41. An antibody that recognizes the peptide of claim 40.

42. Use of the peptide of claim 40 in the detection of an ovarian tumor or tumor vasculature.

43. Use of the peptide of claim 40 in the localization of an ovarian tumor or tumor vasculature.

44. Use of the peptide of claim 40 in the treatment of an ovarian tumor or tumor vasculature.

45. A method of localizing an ovarian tumor vasculature in a subject, the method comprising the steps of:
a. contacting said subject with a ligand that binds a nucleic acid molecule, or its encoded protein, whereby the sequence of said nucleic acid molecule is any one of the sequences set forth in SEQ ID No: 1, 2, 13, 14, 26, 27, 35, 37, 39, 42, 43, 47, 58, 68, 104, 106, 108, 111, 113, 116, 118, 119, 121, 127, 130, 132, 134, 146, 152, 165, 169, 170, 179, and 181; and
b. localizing said ligand,
thereby localizing an ovarian tumor vasculature in a subject.

46. A method of treating an ovarian tumor in a subject, the method comprising the steps of localizing said solid tumor by the method of claim 45; and irradiating said solid tumor.

47. A method of treating an ovarian tumor in a subject, the method comprising the steps of:
a. localizing said solid tumor by the method of claim 45;
b. contacting the localized tumor with a photoactivatable cytotoxic drug or a pharmaceutical composition; and
c. contacting said solid tumor with a concentrated light source.

48. A method of localizing a renal tumor vasculature in a subject, the method comprising the steps of:
a. contacting said subject with a ligand that binds a nucleic acid molecule or its encoded protein, wherein the sequence of said nucleic acid molecule is set forth in SEQ ID No. 30; and
b. localizing said ligand.

49. A method of treating a renal tumor in a subject, the method comprising the steps of localizing said solid tumor by the method of claim 45 and irradiating said solid tumor.

50. A method of treating a renal tumor in a subject, the method comprising the steps of:
a. localizing said solid tumor by the method of claim 48;
b. contacting said tumor with a photoactivatable cytotoxic drug or pharmaceutical composition; and
c. contacting said solid tumor with a concentrated light source.

51. A method of localizing a breast cancer tumor vasculature in a subject, the method comprising the steps of:
a. contacting said subject with a ligand that binds a nucleic acid molecule or its encoded protein, wherein the sequence of said nucleic acid molecule is set forth in SEQ ID No: 21; and
b. localizing said ligand.

52. A method of treating a breast cancer tumor in a subject, the method comprising the steps of localizing said solid tumor by the method of claim 51 and irradiating said solid tumor, thereby treating a breast cancer tumor in a subject.

53. A method of treating a breast cancer tumor in a subject, the method comprising the steps of:
a. localizing said solid tumor by the method of claim 51;
b. contacting said localized tumor with a photoactivatable cytotoxic drug or pharmaceutical composition; and
c. contacting said solid tumor with a concentrated light source.

54. A method of treating an ovarian tumor in a subject, the method comprising the step of localizing said ovarian tumor using the method of claim 45; and contacting the localized tumor with an antibody or ligand that is conjugated to a radioactive isotope, a nucleic acid molecule, an antisense nucleotide, a RNAi, a cytotoxic virus or pathogen, a nanoparticle, an engineered T cell or an engineered cytotoxic cell.

55. A method of treating a renal tumor in a subject, the method comprising the step of localizing said ovarian tumor using the method of claim 48; and contacting the localized tumor with an antibody or ligand that is conjugated to a radioactive isotope, a nucleic acid molecule, an antisense nucleotide, a RNAi, a cytotoxic virus or pathogen, a nanoparticle, an engineered T cell or an engineered cytotoxic cell.

56. A method of treating a breast cancer tumor in a subject, the method comprising the step of localizing said ovarian tumor using the method of claim 51; and contacting the localized tumor with an antibody or ligand that is conjugated to a radioactive isotope, a nucleic acid molecule, an antisense nucleotide, a RNAi, a cytotoxic virus or pathogen, a nanoparticle, an engineered T cell or an engineered cytotoxic cell.

57. A method of impeding a vascularization of an ovarian tumor in a subject, the method comprising the step of localizing an ovarian tumor vasculature using the method of claim 45; and contacting said subject with an antisense or RNAi molecule capable of being taken up by a vasculature cell of said ovarian tumor and impeding the activity of said nucleic acid or its encoded protein, thereby impeding a vascularization of a solid ovarian tumor in a subject.

58. A method of impeding a vascularization of a renal tumor in a subject, the method comprising the step of localizing an ovarian tumor vasculature using the method of claim 48; and contacting said subject with an antisense or RNAi molecule capable of being taken up by a vasculature cell of said renal tumor and impeding the activity of said nucleic acid or its encoded protein, thereby impeding a solid renal tumor in a subject.

59. A method of impeding a vascularization of a breast cancer tumor in a subject, the method comprising the step of localizing an ovarian tumor vasculature using the method of claim 51; and contacting said subject with an antisense or RNAi molecule capable of being taken up by a vasculature cell of said breast cancer tumor and impeding the activity of said nucleic acid or its encoded protein, thereby impeding a vasculature cell of said breast cancer tumor.

60. A method of detecting a presence of an ovarian tumor in a subject, the method comprising the step of detecting a presence of a nucleic acid or its encoded protein in a body fluid of said subject, whereby the sequence of said nucleic acid molecule is any one of the sequences set forth in SEQ ID No: 2, 69, 14, 35, 42, 68, 121, 127, 169, 179, and 181, whereby said presence in a body fluid of said protein indicates said presence of an ovarian tumor vasculature cell in said subject.

61. A method of detecting a presence of a breast cancer vasculature cell in a subject, the method comprising the step of: detecting a presence of a nucleic acid as set forth in SEQ ID No: 21 or its encoded protein, in a body fluid of said subject, whereby said presence in a body fluid of said nucleic acid or its encoded protein indicates said presence of a breast cancer vasculature cell in said subject.

62. An isolated peptide having an amino acid sequence as set forth in SEQ ID No: 88.

63. An antibody specific against the peptide of claim 62.

64. Use of the peptide of claim 62 in the localization, detection, or a composition used for the treatment of an ovarian tumor or tumor vasculature.
